United States Patent Application Publication US 2009/0075829 A1 - sequence listing, part 4

SEQ ID NO: 103 - DNA, 100285 bp, Arabidopsis thaliana
gaattctccggcgacattagccgtctccaatatacatcttttcccggaagcggatattgagaacgagcacatatttgttggcagattctcgcaaacaatgttttcccctacaatttatagaagagaaagaaaaaaatacaataagaatcttaaaaatcaaagattcgtatgagaattaacgctttcttttttcctatggttgatcttatatctttcgtgtaattggtcaaactatgaaaatctagggttcttcctatgctgatctaaagactgatgaagattttcaatccaagacgttttgatgaatgtaaaatatgaatatgtttgtacgtacctatagccgcatggagaagacttgagagaatgagaaagattggcaatttgagggaagaaaaagacattgtttctgcgtttttcttttctctcttctcctctgtctccttttcttgatttgtaggggttaaagattttgaacctcgagatgttttcaaggaaaaatgtaatatagagagaacgtggaaataggacgcgtatatgttgaagggatgttgtggggtgtgtgtgtacatatatacaagaatgatttgttaaaaatatttgaaaaaagaatgatttgtatttactatttaatttttttgctttatgacattctctatctatggtgttactataatagtaagaattgtattttcttttgtcaacagtaaagattacattttgtatagtaattgcaaaaaaaaattcttgtgttctgtaatttttctattttaatgtctttgtaatctaattgatatttatatgcatattttgtggaaatcacaaaaaagtcatcaacttggacgtgggattccaaaaaattctcattttgttaataaaataaacctaattctagtgtgttcaaaggttgacaaaaatttgcatacgaaagatgatttatatattgtcgagttgctgctatggttaatcaacgattcaatgaactagagctttttaatccagattaaaatactttaaatgatattaacatgagtcattatgtattttcaaacttttttttatttacttttttttactattcagagcttattagtattttggtcacaggagacttttgctcagattctttgaaatcgtctacatgatactacttaattaatcttttaatgtttggtcaaacgtaatcaaaagttttagatatattgtaaaagatttagttggattatctttttcattatattattagacttttcgggtgagggtgttacttggaaacaaagcgacgtgcttacaatacatgtcttcacgtccgtatttgtctcaacgcgttactattattgtttttacacacgagctctatgacttgttgtacttcaaaattatacaaattggtatagtttcggttgaactagtaacttggaaactcaagaaattcatcctaaatacattatatctgacaagtctaattataaatcagtaataaataaaaaaagtcagattaacatctgccactagctggttatctaacttctaacgtaaacgaataactaatgttttgatgcagagcacatcagccagaataataaatttcctagtggtgtagtacatgcatttcatcgatcaaaagccaacattctttgacttttttctaggattgcattcatcaattctacaatgtacttgtttttaattctagagcaagaaacttatccaacacctacttgtaggaagctggtcaatttcttcggtttagtttggtttatactttatatggccaatttcctttgggtttgcttaaaacaaaaatttacatcaggcccaactctttattatctttgacctgccattaacaaaacaaaactggcctatgcttaatggcttaatgcttatctttttgtttaggtccgtaagagcaaagccacgtgtcataacacaagataagtggaacccacatgaatcgaatccttcgtccacctcacaatccgaatatccgatcctctctccctcctccaaaaccaaaccttccaaagtttttttcaaaacaacacagaaaaaatggcagcaaccgccgcaacaacgacgtcgtctcaccttcttctctcaagctcacgtcacgtggcatcatcatcccagccttcaatcctttcaccgagatctctcttctccaacaacgggaaacgagcaccaactggagtgaggaaccatcagtatgcgagtggagtgaggtgtatggccgtagcggcggatgctgctgagacgaaaacggcggcgaggaagaagagtggatacgaacttcaaacgttgacgggctggttgctgagacaagagatgaaaggagagatagatgcagagctgacgatagtgatgtcgagtatatcattggcttgtaagcagatcgcttcacttgttcaacgtgccggaatctctaacctgaccggagttcaaggcgccgttaatattcagggagaggatcagaagaagcttgacgtcatctctaatgaggtctcattctttttacacatgctctgcttttgttggttgaatttgtgataaattagtgtagaccacatagttgattcatgggaatgggtggatgtataataaagattgagtggtggtgagtgcaggtgttttccaactgtttgagatcaagtggaagaacgggaatcatagcctcggaggaagaggacgtgccagttgcggtggaggagagttactccggcaactacgtcgtcgtgtttgaccctcttgatggttcctccaacattgacgctgccgtctctactggttctatcttcggtatctatagccccaatgacgaatgcattgtcgacgactccgacgatatctcagctgtatactactcttccttccacttccatatatctttaggagatagagatcctacaatgtaaattaggtgaccttttggcttataatgttgttgcagcttgggtcagaagaacaaaggtgtatagtaaacgtgtgccagccagggaacaacttgttagcagccggctactgtatgtactcgagctcggtcatcttcgttcttactctaggcaaaggcgttttctccttcacgctcgatccaatgtacggtgagtttgtcctcacgcaagaaaacattgagatccccaaagccgggagaatctactctttcaacgaagggaattaccagatgtgggacgataaactaaagaagtacattgatgatcttaaggaccctggtccaactgggaagccttactccgcaaggtacattggaagtttggttggagattttcacaggactttattgtatggtgggatttacgggtaccctcgtgacgcaaagagcaaaaatggaaaacttaggctgttgtatgagtgtgcaccaatgagtttcattgttgaacaagctggagggaaaggttctgatggacattcgagagtactagatatccaaccgactgaggtaactcaaactaaaattagactagtttcactctctactgctaagtttacatctaaaattggtgtcatcagactaattcttatgtttggaatacttgacacagatacatcagagggttcctctatacattggaagcacagaggaagtagagaagctggagaagtacttggcttgagtcatgtactaaacataagccatttaatttctattgtaagccagtttctgactacatggtatatgcaaatagatgcataatggtgaaagtcctattttgttgtcaatatcaatatagagaagaaatcagctgttaaaactatagaccaagaaaccaagtttaattaaaactatagaccaaaaaaccaagtttaatttatacacctacatgtaatactagttaattataagctacgttatgggatagccttttcatatttcacagatcattacaagaataagcactagcagcatagtaaggagaaaacagaggatcttgcattggtggtcttggagtcaatcatagtcttcaaaatcagtcaattgtctgtcatgtcactctttgctttcaaatcttgtctgtgttaagagaagaatggctcgagttagagagaggatcaatacatcttgaaatctagaatatgatacacaaatgaagcatcaagaatgagaatgagtgaaaggggaaaatgtatatctataatcaaatgcagaacagaaaatactcacttgaatcacatcagtcacggttgatgtatattccaaaaagggctggtcagactcgagattacaatcccctgattcaggagacgacctgtgatttagtatagcgtatgatcagacatcaagaggtaataatagctatttacaaaaactgatcctacaaaactaaagtacataccctgaaacagtttgagtgggttgatttggggtcagtgacaagcaatgatttgcacttccttcacaaccaagatcgaaatcaactagtagctccgagaaatccagattagaaaagtccatgtcaaacaaatcaacttctggctcagacccagatggagaagttgaaactaaatctgcagtggcaggtgcctctaagcacgtttctgtgtcagtgtcatcaaagttgagctttcctttcacatggtctctcttatttgacatcttcaggttagacttgaccggtgaagaaaaagaaataagatggcttctttccactgaataagaagtaatttgcttgagagggctgattgtgaatctctcctttgtaacaattgtgcagtttgtatttgtaggagtaacttctttctgggaactgttggacttatcactcccagaagaagcatgtttttgtggtgtcctaaagcatgttgaactagtaggaacagacgaatcagccttattgaacaaacacttcaccacacttgacccattaccaatcaactcattacttgcagagtttttagccactgctagtgtttcagatgtgaaattgttagctgctttatcagcttgtggcaacttattagtccctggtccaaggaaaaaaaaaagtcacaatattagtttaagagctacatcaaatgtaataaacatgtaggcacagaaacataccagttgctctagtgatccttgatttcctagataccggaggagctgttacagaaacttcaggaccttttcgtttcccagttatagactgactcgtcgaaggtgtggaaaaattcccaaaatctactcttttgttaccaagcaatgatactgacataccatttagtgtgttgtactgagataagcctgaaaaataagagcactgctcttttagttctcaagtgacagatttggattctaataagcctaatatgtgcactaagatctaagaagcaaacaagagctagagctacttcaatcaataatgtggagaaccaacctaatcattccaatttagaacagcttaaaaacaacaaaatctccaaacctgaagaagagatactgtgatttttctgttgagaagttggagctgaagccggaggaggagcggtgaggctagcgttgtaagtattcatcacattttccatcccctgcaacagattttgaaccctaattttctcttgatccaatttcagtttctcttgatccagactcactttctgcttctttagagatacgtaatggttcaacatagcatcaagagtcatcaaactattcggaacctgcgaatgaatccccaaaaaaacaaaaatgtaagaaaaacaatcaaaacccatagatagttttcaattgactaaacaagcaattcgaatacatacattgcgaattggggaatcagagatgagagaagaagcttcagatctaaagagggctcgagtttctgagaatcgattgtcgtggagatagcgatcgacgataaaagcaacttgcgttggggtaacttcacctttgccgatgagattcgatcctttagatctgctcgatttccccattgctgtgtcttctgaattaatcgaaaaccctaattaacacgaatatgaagcaaagagagagagcgaagttgaaaagacctgaagaatctgaataatgaatgggttttagtaaaataagcagcgggagattttcaaaacatcctttggaacgatgtcgttttcttaaaattttgccgggatactgttttcacctgttcgtggcggtaactcttgaaattttaaaagacgaaactccaaatttttaccgttaatcattcgaatagtaggatttccttccaaactagtcgatctcttctaggtgaaggatacattgacgtttaaaaagaaatcttaagtagataaaagtgttccattgtgattgtcaacaaaccaaattatcagatagaaacaaagaaacatgtatatttaaaatttacacaaaaatgaggttcagtgaatagaaaacaaatacacaagatacaaatatctatagtacaattcagagcgttgaggactctatatctttagacgaagatacggatacctcttttacgtccaaggaagagaaacatagaaatatagactgagcgtagagtgttaaaccaaaggtgaaaatacaagtaagcaaacgtgagagccgtgagagaagcaaggcaagagatgaggactaagctcaaggaagctttttcaacacggatcaagatcatcgagaaggtgaaggcaagaatcatagagatgatcgagataaacaatgccgaaagtccgaacataagctttgttggtaaatcataacgaaaatcctcttctgcgtaccgagaagtgaagatcgataaaaatatcacgatagacatcatcgatgagaagagggcaaccgaatctgataaggtaaatatatcgaacaataatctctttctaaaatttgggaagcccaacgtatttgctttgtcacctgaatcatcatttccacctggtatagtaatggctgctgcaaagaccacagttgctatcagcgttgctccgagcatacatgctgtcgcggtttctttcatccatctctctccttctttgcgtaagttttcgtgttgttccgtgaatatatcatgcgctagttcgcccttagtgtttttggtttcgatgtatgaacgaggaactatttctttaacagcctgtaatgtaatttgaaggattttaagactacctcaaatagtaacttaccaatataacgagaataccaggagattttctaccgaagtctaaaatatgttatattagccattactaaattgtatttggcgtaccttgaaccaaaggagctctttttgcatatgaagtgctgctcctgatccaacttgttgacgattcataggtggtaaccgtgccacaagatgcaacaaagtatctttagattgtttttctttataagatgctatcaaatccttgatgcctccaagttcatagattaggctgaagatattttcatgacgatataaagcagcaacatggaataaagttcggttattattatcaactatccatagcagatctagatgagaacgaataagaataactaaaatctcaacatttcccaattccgcagcatcaaagagtagccctgaaaatgacttgataaactctataaaattttccgttggcaaaaccaaataccataacttctctaccagccgatgagctaaggttctcattttttgatcacgaaagaagaatcccttagaaactaaaatcaaaaaatgaaaaaaaaaaaagtttcagttgtgatttcaatggacaatagtatcatatatataatctttcaaattgtttatttcttctacttacaagaacttgctacttgctgaaacaagttaagctggcttttatgggaaatggcagaagtcttgcgagccaacaagtgcaaggctttgttactatttggataaagggctagttcttttctatacaaatccactctttccaacatccacagaggtacatctgcaaatacacctgagtgagatgcaagaccaaacttgacaaaagtggaaaacaaaaagacaaaaagacaaaaagctctttgaagggtagattatatatttaccataaatatcagctgatatcatggtatgaaagagattcagatattgctgatcattgagatctttgatgcttgttttggagaaaagatattgaaccatttctccatggccgtacaaagcggcgatgtggattggtgtcattgttttctcgttcgaaatatccggaagatctcggatcatgtttattaacatctcagcagtctcaatgtctcccaacgcggcagcaaaagacaagggtgtgttgccgtctttgtttttcagtgacaagtcagggggatccatttctctgagtagatttctcacaaaatccttgtgctttgctgcaacagctatgtgaagagcaatctcagaattaccagtaatttgctccacgacattacactcttttctcgatattaaagtgctggctgttttccaatctcctgtcagaacagctttatacattaaattccggctatgtggttttgtaactggagaaagaaatatgaaaatagaagagattaacaaaagaacacaaacaaaaagtggaatcaataaataaagagagcttatatgaactgttgcatatataccatcttctgaagtatgatcctcaacattgggcagtgaactaggatcttcatttggagatgacccacttggctctcctacttccactattacgtcttcttggtgaagctgtttgcctttatccaagattcccataattgtagattgagatctcattttggcagcttcacactctaatctccaaattggtcagcttccctggattatcaacatcacatataattatttagtttacagtaaagagatcatatatattagaaaagagtctaaccataccttcaatatcttttgtcgtcgggtaagacaatgaaattaacaggtacacgaaaaatatcgtacaagcaggtcaatggtggtagcacaaccatagatgatgcttataagcaactcgatgaacatggtgaaaagttcgtcgatcaatttctaattagtaattacaaattgaacgatgcattgactatttttttgttttactttgagtacaaaaactatgatatgcataatcacgtaccatctttagcctaacttaataacatgttggaataaagacgcatacaaatttgagatcagtttcctctcgtcattactcaattattatcgtaacaattaaaaaaaaaaaaacagtagtggcgccggccatttgaatggagccaaactgaaatgttctattattggtttttatatgggaaaaatatcatttaaattattattttaccattttcgttggtttaaagtttgaactctggacttggtaaattaaatcctcaattttatgttgattttcaatttaaattctcgttaactaagccaattgaggcacaaatttttttttttccggcatcgtcggtcgatttaaagacgagagattactttgaattggaagaagaagagaaaattcgaagaaaatgagagatttcgaagaaaaagggagaaaaaatcagaagttttgtaaaaaaaattataacgatgtgctttaattggcttagtaaacgaaaattcatgattaaaataaaagttaacataaaattgaggatttaaatcacaaggtccagagtttatgctttaaaccaacgaaaatgattaagtgatgatttaaatgacatttttctcgtttttatatatctcaaaactaaataacccaacaaaacaactcagtccacaagaaacagaagtttttgctagggaaaacactgacttgttaccaacttctagaaaaatacataaacttttgttattcacttccaacttatatgataaaatatacatttttgtgagactttggataaatttcaaattgatagccgcgtttgccatgaaagatgatgtgcccttcttaatttgttctttgacatagttgatgtggtgtcaaaaagaaaacaatatataatcacggtttggagacgatgttcatgtgatagagccaacaaccaaatgacgacccgtagtagattaagtcagcagcggcaatttccgggaagatttatcacactaagaagccaccctagatactctcataagtggattcaatggacttcgtccatgcctttactttacttaatactaccacagtaccactattggttccatctagtattttgtgctactaaactatttggcatgtcgagtttgtaactggagttaaataaaatgcacttgagtgtaattggaattaaatgaaaaagataagcatttttggggttttacaacagtgaaaacaaagatagggaaaaactcagaaacgagggagacaaaagttgacacctttaacgctttttcacattgtccaagtgcttgacccatacctctctgttcttcctctctctcttcccccaccacagtcaccactttactcttctccatcaggggtccgatcccatctccaattttaaaccctagaaatcaatctcaaaagcaagcgtgcttcattaatggcgagcttcattctctccaggtcattactcgttctactcctgtctctcaccgcattactctccagcatctcgatttcggaagctacctcatcgttctcgttcacaagctccggtaaaaatgcgagctttgagtccgaagactttgccctgtacggcgacgctaagctcgtcgacggcggatcttcgattcagctgactgactcagtgagtcacggtggtgggcgagtcatctataagaaacccattgagtccatgaacaatataaaattcgagtatttcaccggattctctactttcttctctttctcgatttctcctagtcgtggtgggagactcggatttgtagtgtttcctgttaatgaaacgtttgatcactctttattccaagtaaagttcgatacttttgacagtttcacccaaattggagattctaatgtcgcggtgattgttgatggtgctacggtgtctgagaggattcgcaatttcacgatcgcaaacttggagaagacggagaaggttttgttgtacgcttggattaattaccaagctggtggcaagttcttagaagtccggttaagtaaatctaaaagctttgaatctgttcttcctctgatgtttgatcagattgatttgtcacaaatgttgagagatgaggatgagttcatggttgctgtgaattcgtatagtgggaatgtaaatcttcattcttggagtttagaagtgagacactccgagtatgagcactcttgggcgccggtgcttttggaggaacaacttagaaaagaggaacaacttagaaaagaggaggctgcgaagaagaggacaagtgataggatgtgggaggttgtcacttgcttcgtcatgacctttggatcaacagggcttgtgttctttgccatgatgcatatatatgcagctttcaaaaggaacaatcttgcgatggtgatgcaggaggaatgtgggatcaagaccaaggagtttgggtataagaagatggagaaaatggaagttgtgacgagtaatgctgatgcgaaacaagaaaggaagtgaagtcatgtttggtgatttttgtgtgtttaggatatgtgaactgttaatgtagtcaagtagattcttggtaactagttatccacgaggttcttcactggctaatgtaaccccttcttattttcatgtgtgtaagcttgcaaccttgttaccatttggcattttagtttgatttggcatgtaaaaatatgagaagaatgttgtagaatgcacaccaaacttgagtgcgagggatgacaaaaacaaattccaactcctacacaaaatagatttgtaactaatcacaatcatttgaagaacgcaatgtagtttatcttcatctacacaaaatcttcaaccggagataagcttcaagacgatgactgctgtgttaatgagcatgaggggtagcctcatgtactggcaggcatggatcagaccaatgatttggcctttgggagagtttcttctatcggtttggtggagttctccgagtgtccatcctcttggaacaaggaaacggtcttcgttgaggattgccagtgcatttgcaaagagcagcagaccttttaacaatgtccagaagcccattcttttctgtgatgcatagagctcaaaatgatcagaatcagggaaagagagtggaacaaagttatcttttaataggtttagaaacaaaatgaatggagactaagtgcatgcaaatgtaagctactgatgtgttctgtagatctaaagcgcagagaaccatgaagatagcagtgcaaaatcttgtttctaacacatcaaaaaagccaccagattgaacttattcctgccttgcaataatatctagaaatctaaacaatggcaggacggtcaccgagttagcattccaaagagccttaacctagacatattgtatatcaacacttctgaggatatgctaatcacataagcaacataagtatgcttcacgagaaaagcaacaagctcgatcaaccctaagagcactagatgagattttcttgtggatctgcttcaacaaaagtacacttagtcaatcacaacatcttgaatgaaaaaagaagaagagaggaatcctgagacttcccagtttcagcaatcaaaagattactaagtttcatcacaattcacaagtgaagaagacaatctatcaatgaacactttgtctaaaccaaaatgtgaaaatagatattagagcaaatgcataccgattaagctaagcttggtacagaaacagagaatacacaatcccaattttaagctatgcaataaattacgcaggaatcataaaccttgaaactgctgacctaaacatgagatcgagaaagtaaatgaagatccaaggttgctaatagaagaagcagccaaactaatcgatcaattcccacaaggaagcgaaaaacccaaatctagcaacaaccagtgaagaaaaaatcaaaatgaaggagctgaatcgagtgcaagattaccgtaagaaaacgctccggcgatgaagacggcctgagaacgagagaattgaatccgtcggtgaggtttaatttgtttcttctttagaaaattgaactgatttttcttcttcagcattaagtaaaaacccgaaccgggttaggattgacccggtttgaataaaagtcgggtcaggacccgatatgtttttttttgaagaggaagaagatttggataaaccctgacagtggtgtcaaaaacccatcaatggcttcacttcttattttcccccaccttcaccattttgattcttcactggaccgtagagaggtactagtagttcgccattcacaagcatcaaggcgatttctcactccgaaagcttcaattaatggcagcggaatcacaaacggagctgcagcggaaaccacctctaaacctagtcgcaaagggaggaagaagaagcaaacatcgacggtaattgagaaagataacaccgagactgatcctgaattgaatccggagttagctgattacgacgacgggatcgagtttccgtacgacgatccgcctcttgtgtgttgcttcggagctgtacagaaggagtttgttccggtggtgcgagtccatgataatccgatgcatcctgatatgtactcgcagtggaagatgctacagtgggatccaccggagtttgggagagctccgggaggtccgccgtcgaatgtggcgatctctcatgtacggttaggtgggagagctgcgtttatggggaaagtaggtgaagatgattttggagatgagcttgttctgatgatgaatcaggagagagttcagacgagagctgtgaaattcgatgagaattcgaaaactgcttgtactcgtgtcaagatcaagtttaaggacgggaaaatgatggcggagactgtgaaagaaccacctgaggactcgctatttgcttcagaactcaatttagctgtgcttaaagaggtaacaatctttcaatctatgaggaacaatctagggtttaagaggaacaatctagggtgtatgacattatagctcgagcataatcatgaaacagagcacctagggtttaggaggaacaagtttagtctagggtttatgacatgaaagctcgagcttggtttcttatgcaaaagtctctgtctttgagcataaaggataagatttggataatgaaacagagcacttctctgcttggtttttaagctttttgtttgttactggtgcttctaatgcaggcgaggatttttcatttcaattcagaagtgttgacgtctcctacaatgcaatcaactctttttacggcaatacaatggtctaagaagtttggtgggcttattttctttgacttgaatctcccattaccgctgtggagatcgcgcaatgagactaggaagttgatcaagaaagcatggaatgaagcaaacatcattgaagtttcacagcaagagcttgagtttctacttgatgaagattactacgagaggagaagaaactacacaccacagtacttcgctgaggattttgatcagacgaaaaacagaagagactattaccattacacaccagaggaaatcaagtcattgtggcatgacaagctgaagctactggttgtgactgatggaacacttcggcttcattactatactcctacttttgatggtgttgtgattggaacagaagatgtgcttataactcctttcacctgtgataggacaggttctggtgatgctgttgttgcagggataatgagaaagctaacaacttgtcctgagatgtttgaggatcaggatgtgatggagcgacagctcaggtttgcagttgctgctgggatcatagcgcagtggacaattggtgcagttagaggtttccctactgaaagcgcgacacagaatttgaaagaacaagtttatgttccatcaatgtggtagaatagaagatgaagaactgaacttgtgtactcaatgtttttgaacaatgtgtgagttgtatactgattcagatttgtaatccagagaaatgtacaatcaatttttttagttcaatctggatggtccaagtcttgatgcttctcatgaaaggagaatcgattctacaagctgtcttgatcggatacaatcatacaaatggaaaatgaatcgtacttttttagtgctatattactcctaattctaattacaaaacttttcaacagagaacaatgcaatcagatcttgcatttacaagtgttcacggactttttgaacaatgcaatcagatttcacataatacaagccaaatatttaataaaatatcaaagatttttgggatgtttacttatttgaaagagatattgggatgtttacttatggtgatgtcaaagaaaaagcaaacgcaaagaagtttttgggtggtaacttccaatatctcagtttgtgatgtttcccagctttgcttggtaagatatgtagttagagccttagagggacttgaaatgaatgttaataacttcaatatttcagtttgtgatgtcaaagacagtttgtcaaaattaagtatgcgttgaaagtgattaaatcaaataaagactttataagtagcctagcttagggggatgggtaagttatttttaaaattgttcctccattagacatgatattttcttgagactttgagagaatgataaattttgtatacttcatactttttaaccaacgttagttaatttttctgcatgctaaaatcgtctagctacatattgcattagataccactggcacattcattctgattttggttgatatcattgaagagagagcagacaaaataaagtgaatgtagcggtaatcagctcacgtcttattgaatcaaacctcttggtaattagttgatttgtagaattaatatcataaatagatttggctagacatgttttctatatatatatcaagaattcaaaagaaaaatactttgtaatagacgtatacataataaaaattctttgtccagttaatgaacatatatagcaactgaatattatttggtatcccgatacaacaaacaaaacaaagccacaaaaaaagaaacctaaaagagtaagaaaagacaaaaactaaaacataaaataacagagtagaatctaagctgaacagctcctgcatgttcaaatcccccataatagaaagacgtgttgctcgacatctttgatttgtagtagtcggattttggatacttgcctcgtgtcctccaatgactctttccgctgctccggtcttatgggaaaccaatctttccgccaaaggagaggataattaaaagaaggttgatctctcgtatggatgcattcaataatgtctccatctggactctctctagttataaaaaaatatagtatcaatataagttgaataaagaagtcacatgaacagtttttagaaaatgtaggataagtggtcatgagtggtttacaacgtgctttgatggtcatgagtggtttataaaaaagaattataatagacaatttatacatttttaaaaattataatttctaaactaattattatggcattaaaaataatttattactactttttgctatggttttgcttatattttgcttctcttttgcttttgttttgcttgttgtcttcaaatatagttcttccaaaatttctacttaattgattcttaaaagatgatttcattgcttaaattatgtttacatattttgtttgaattttttattagaataacacttactaaaattaaattattaatattaaaaaaacattactagtttgcctcaaaatacaatttttcaagccactagaattttcgataatatggaaagcaatagtatcccaccacaatagttttgtaaaataggcttacattaatttacccaacttgaactaaatagagcctaataactaaaatcttccactcacacgactgtggagcgattggacaagacgaaaacgattcgatctgttaatttcaagggccaaggcccaaagggatttctgagaaccaggtttggttctaaaataaatgtcattttgctcctaaccataagtatgagggttgttaacaatttctctagaatttatatgtttatgacaatataagttaaatttcaaaatcttcataactatttatatcatatatgcctagcgaacaatattcctaattatcagatctagcagtatagaaaaatcgtaactataatatcactctttttcatataaaaccttttatggttgtctatcttaatcagtaatatttcgaattaaaattttcaaattgaaatccaaaacaaaaaaattttgctcgtaccgtccagaagataaacaatctcggctggctgtcccatatatctgcggataaacctgaatatcaaaataaacaaacttacagttatactaaatttacatatataagtctttttttaatcgaaatacaaaatctgataagatattaataataacgttacctgccagccggcctctatactgttgaggtcattgttttcgtaggacctaacaccagccatagttgacccaaactgaatttcgtagcgttgttgtcaattttccaatgtcatacattcatagtgactttagttctgtatatcctaggtggattttccatagaacaacaacatactatatccaaaaaaaataaaaatatcctgattagttatttttagttttgtcattgaaataatgaaataataatatcgaaagttagttttgaatgaattctttaacatagaaatccaaaatagaactactattctaacattagcaaaatcacccaaacgttatctaccattacgaatcaaacaattaattagtttcaaatacaaagattgaataacatataacaaaaacgcagaaagatccttgaacttggggattttatcaactctttaaataagttaaagatatgatttcctcgaaaaagtttacacagttttatatagttatattaccaaaagattatgttagatagtactcttcttaatttcttataatagatccttaaaaaatatattctttttcttgtaatatactcagatcacttggacgtattgatgaaaagttaaaaagatataagaacctgtggtcgaacctactgtggaaacattattttcttagcattaaaacaaagaaaacatatggtggaaacatgatttcataaagtaaatacaaccggttgggcctaaacttttttttttttttttttttgggcctaaacatagtagagacagacgaaattggagaattataacgtaaaatctttaactatagtttttcatcttatcgttaaagcttaaatcttgtcgtcattcaaacttttcattttatatatttgttttgtttttatgttatgtaagtttacaattttgatatttttaataattattatgttttgtcaaataaaaaacattataatattagattttaattttctttttattaagaaatctgcttaaagactgcaattccttaagcgcaaagagcaaagctctaatctgtaaaacatgtgagaaccgtaattggtagatctcatgaagagccaatcttcaagcatcacacattcataatgggcaacttcaatctcaacaacaaaaaacataaacgcaaaaggagagggatttccaaggatatacggccggaactggcccaacaggctgcggatagaccgtacgtagctatgggaatgggtgctaccagcgacaaagctacttacattccatccatgccgataatcgaaattcagatgctgcacagaattgggtgacttcttgtacacggaactgagcaaatgaccattccgaggtgaaatgttttggcaaaatccagcagcattgtatgaagatattaggtacataacagaagcatgtgttcatccccatacgcacaattataaatatgaaggaaatcaattcctgaatttgccggttttgaggagaaatatgaaatgcaaaaactattactctgcaatatcgtcctcacgtctaaaacacatttcctcactttggtttcttatggaaagtctctgtctggaaaatctcattgcaaatgactggtttcttgttcagtatcacaaggatttttcatttcagttcagaagtgttgacatctcctacaatgtagtcaactctttttaaggcacagacaatggtctaaaaagtttggagtgctgtataatgattcaaatttgtaccaatatagtaatgtacaatcaattttggaggtcacactgataacaacgatatgaaagaatgaggaaaaactgttttcccatgatatctctcttttgtctacacagcttcccgtgcaaggtcacaaacttgctctagctgacccaagtcatcatgctcctgtatggtgaatcgatcctacaagctgtatgtatcttccaaaaactcgggttacctctgtttcctatagtgtacaaagactataaactcgacgcagattcttctatgtcttgatgcactgtagcattcttcaatgtatgacatcggaatcttgactgttttcgggtactgtatcactgctatcttaaggcactcttcttccaactctttgagtctgtccttagacttgattgtttccgcagctgctcaggatgagacttgttacagatgcaatcaggttgtgggttcgcatagaagttctcctctagcctgggaagtgcagcaggcagtctcccatatgctgctccaatcctgtctctatttaatctcttaacctcagaagaaaactcttcccaagatatgataccctcatcaaaatgatctatcagtctaacaaaattcagcctgaaataatcacacagaacaaatcagcacaaaaccagtgaaagaaactacataatctcgccaaaatgaaaagctttattccatggtaccatacctgtctggatttatggacttcctaaacccttcaaactttctgtgcccttgtaccgccttagccatattaccatcatatgtatacacaaaaacatcactttcaagggccacaatgtagtccaacgcagcaaggcgattctggtattgactgaaaggctctaactcttcttcagtcgcaagggttgaatgagagaagacatttgggtactctgcacggaaagcatccatactctcgcttccatagatttcaccagcaactatatatacagtcgtggaggacggatatcccatggcttttagaaatatagctgcttctcgcggagacattggacatccgccttgaatccgtctctctcggctatcaatctctttctccttccaatgtttgacactgtacctcatgattctcagctcttctgcttcctcagttgtaagattgtggttgcatcctgtaaaggcaagcatgtccttctcatatctgcaaatccaaaatccatttgatacggaaccaagatccaaactatttcccttgttgatgataaaagatatgtcggatttacctcaaatgcagagcgatatacggctcagtgttgtttcttaaccggttaaccaaaatcttccctaggtcctcaatctcctttgtgtatagcagtgcctggtaattagcacgacatctcagtcgttggatagatggtggcaggccattgttagcaagccgtgagtccgtaagcgtgaactttaacaccttgtgacgtttcaacaatggcaacatttcgcttctgtagtaactagcctgtatatcagttgtgaatttaagaatttacttctcattgtgacaagcccttacatatataggagaagagataaaactctggaagctaacaacgaaacctacactaatatgaacaaagcacggaccttagaccaagaaacaggggccttgagaagaggtttcattgcggcatactgaggaggcaagtactcgacaatgtcaacatcgtgtttcagtacgttcatgaagtttctccagtcaaaaatatctttgaacgtgctgcactcaaaacaatatttattggcattctgcttcatttttagtaaatatcttgtggtatcaggtcaataagagtgccaagatatagagagaagacctcgggtcagtccagaaagattcatggtcaagcagaggaagaacaagagttgcattcataatcttggcaacagcgaccatgtcacatatctgcatattggtcaaaaccaacaaagaatagtacatcaaaacacttgactatggagaaaacggagatcaataccctctaatatccttttgaagtaaactcaccccagttctcatctgattcaatcctccatttgcgtgtactacaagatacccattggtttggcgttgcagtcctagacaaagacataaataccagattttgaaaaatcagaactgcaaacgagcttgaagaagaactaggaattttaagatagcaacatactcgtatagttcttagggcgcgtcacacattggcgataattcccgctttcaggtttctgccaaatttccggaatctgtgagaagagacaacaaaagcataaatccaaatgaccaagatcctcgaaaatgaagtcaaacagaagaaaaaactatcttccttacattgcaaaaacagaggaaatgataaaaaaaaaattagttaactatcaaaacatgtaagacctccgattacactgatcacagagaacttcgcgtactttaaatatgttacttaacgaatttaagtcaagttacaatttaactcaacaaaacaggttagacactaacacagattaaaccatatagtcaacggtaatgaactattaatcaaaccaatatcaacttggatccttatggaacttcaagattacatattgcagagctagaggattataaagagtttcaatttcaagtcttcacaaactagaacacaaaatgttatggattctgcataaaattagtaagtcaactaaaatggtaggaaggtattatccacacatcgaagccgcctataattccattgactatatattgctcgtcaaagtctcaatccaatagcaaaaaagtaaacctctcataaaaatcgccaccgagatattgattgttagaaaagctattataattgcacaatgataattcagttttgcaatcattaaagttgttgccagaattcatcttattacctaccccactaggccactacttcttcttcttcgtcccaaaaggagacactaatccaaacattgcaatctgtttacactaacttcgcaatcttaggatcatttctaatgaactgttcaacaaaaccctcaaacaattcagcaggaacaaacacataattaggattgatcccaagtagtatctaactaactaaaaaaaatgctgaatttgatcacaaagattgaatttttaaatccctaaatgtttaaagtaaagaagatgaacaaactcacgggaagcttttcgagaacacgcattggctgagaagaagcttggttctctgcaacttcacgttgagccattgaccaatcatcacgaagcgttctaacaacaacaaactccttcaaacgagcgtgatccaccacgcggacaccacccataaggtagactctaaggaacacagacgcaaccacaagcaacattagaagacccaagatccgacgacccacgtttctccccgatctaaacccttgaccaatcacaaccgtcgatgcaccaccataaaacggaatccagaattttcggaggagaaggtaacgaatcaccggatgactgtaaaatcggtggtagtgatcgtgatggtaatgagatccagtagatgaagcagagctttccgaagatggtgacgagtcttgaccagtcgcatctcctccgtctaaatctgttgatccaacgatgggttggttaattgtattgcagtaatcagatgaattcgagggtcgttcggagataacgtctagagaatcgccaacacggcggcgagtggtgggtgcaattggtacggggttaatcgctccgacgactgacatatcgtcgccggtgaaatagggaattgaagattagacaaaaggaaagagatagagaaagaagagagagggttgatttttaggttttggaggaagtagttgaccatgtatgtatcttctggtatagtcaccgtcaccgtgaaattcgccgaagctgagtttttgttttcagaattttttatattcgccagtgtgtctaattatatatttatgtgactgttctaatcattttttttgtttaggttttacattttttatgtatgatgtgaatggataattttcaagagtttgtcacgtttgtagcacatctttttatatgaatagttttttggatgttagtgtataaatataatttgtcatatcgtttagattaaacaaatataggcaaaagagtgattaacgtgttcttttgaaatagctaagagatactaacctatgatgattaagtttatgatacttaaactttttatcatcgagggcactctgcattgtgacgaagatgtgaagtagacctagaagatgacgcactgactttattgccactgctacaaagctaatcaactttgtaccaaatatacaaaacttcgacctctcacgatgttaaactaatggaattattagaacttaaaaaaatcggattagagattaaaaagaaatgaaattatttagagaggtagttagtaaaagtaaattcgatccagcgtggtgctgtgtcatttatttgactgggaattttcttcagacagtgaaagcaacataatcgatggatgatactatttaacaaaacaggtcgtcacacacgtgtgtataaataagtaaagcgcccactcctttctcatttcgtagcgcgcagagagagagagagagggacgatcttttctataactgaaacactactcgaggccaagttgctttagccgtaatcgtcgtcgtccctcttcccgatattatctcttctctgttcttcgatttcgaaaccctaacctcctctctttaattcgcgttttctggatcgaagatggtggcggctggtaaatccgacctttccttgcccaaaactttcgcctgcagtgccttcgctgcttgcgtcggcgaggtaatcgccggattcctcaatttttcatctcttttaactccatttttcttatcgctgagtatgcttcgattgtaccggaaaactatttgttcgttcgagaaatgtgtgtcgcgatctagactttgttggctatacgcggaaatgtattttcgaatttcgttggtatttgtgaagttctgatcaggttgatctttgtcttttttgtctttatcatcgtatagctggagaattttgattttagcttctatagtgtttctccagattacgtaattccgatagaaatgatttgatctcggaataatcggtcagatctgtggctagaaattgaattttggcatgtgtagtgttgttgatttatgctttagatatgattttgcgaaacattgaaatgattatgagacttgaaaatggaatctatttgatcattgtgattgctatgcaacgcaactgtataatgtttaattatcctcagaacaacatgtatcttctctttggctgtgttgtttcgtcagataattctgttcttatgcaattaaactctctggaccaggtatgcacaattccattggacactgctaaagttaggcttcagctccaaaagtctgctcttgctggtgatgttactctgcctaaatatcgaggattgttgggaactgttggtaccatagcaagggaagaagggttacgttcactatggaaaggtgttgtacctggattgcatcgtcaatgcctatttggaggtcttaggattggaatgtatgagccggtgggttacaaattcttcttctttcatgctccagaaaagtgcttaaactcagtgttttcctagttactacttaaagccttaaccaatttattctactcaggtgaaaaacttgtatgttggaaaagactttgtaggtgatgttccattgagcaagaaaattcttgctggtttgacaacaggtgagcataacgatagaccagcttagaaaaaacacgtaatatatatttcctctttatcacttagttgggctgtttttgttgtctaactctcaggtgcactgggtatcatggtagcaaatcccactgatcttgtgaaagttaggcttcaggccgaaggaaaactagctgcaggtgcgccaagacggtattctggagcgctgaatgcttattcaacaattgtgagacaggtagttatcccgacttggaagttgagattgtgcataagttgcttcaactctacttcatatcttattaatgtggctctgacaggaaggagtccgagctctttggactggtcttggacctaacgtagcaagaaacgctattatcaatgctgctgaattagcgagttacgatcaagtgaaagaggtatgaaactaatatgttctctgtctctctttctaaataagagatcctgatatttgaagcaaccaacattcctttttttttttgtgttcagacgatcttgaagattccgggtttcactgacaacgttgtcacacatattctatctggactgggagcaggattctttgctgtctgcatcggctctcctgtcgacgtggtaaagtatttactcatgacattgaaccttgagtttattcaccacgtttcctgattgtctacttaaatcttgttgtgtggcaggttaagtcaagaatgatgggagattctggtgcttacaagggcaccattgactgcttcgtcaaaactctgaagagcgacgtaagcaactctgcttctgatacctccattgttctagatataacccagaaaatgttacaaactctttacggtttcctctacagggtcctatggcattttacaagggtttcatccccaactttggacgccttggctcatggaacgtaatcatgtttttgaccctcgaacaggtaacaactgatagaatttttattttatcgcaatcgcattcgaatcggtcacgcaaagtcttctttctcattttctaatccgggttcttaatactctaatccaggcaaagaagtatgtccgggaactcgatgcgtccaaaagaaactgagacacatagttttaagcagagggaataagagcaacattgttttcttcttcattttcggtgattgagagaggccagaacttggtcgaatattgttttcggaatagagattcagttttcgagtaaaactgtgaaataaaatttctgtggattgctcatatattggctgtaccatccaacatttatcaaaaatcatacatttttctcctttctttccacaaaaccgagaaaaatcagaaaaagaaactcctgaagaagaaagaggtgacagcatctcagctcagtttcttattttccggattagcccatatctcgagtctaaggtaaagctctctagttttgttgcagataaactcaatagagccaacaatgtaatcctcatatctctcatagaaagctggaaccgtcataaccaccaaaacgcctgccaaattaaccaagaacaaccacaaaatgaatatccagctcaaaagcattccaagtctataggagttttagaatatctacttactggtgtggcaaagtgtctgaaaatccatgagacttccgatcaatgagagaagaaacagtgacactgctactttggtatacaactctgagtctcttgccattgcaatgtcatgcgaaacttggagtagcttgttcacatgaatacgtaaccatatcgaagcttcttccgccatcgcttcacttatttgaaactccggtaacggcggtgatggcctgaagagccaagaaattgaatcagaaatgaagtaatattagttacaagtgaatattaatatacctgttgagaatggaagcagatttggaccagaggaagagaatagagagcaagagaagaagaacacttgaaataagagtaaagatagtgtaagcaaatgcctcaaacaccatccatgaagctattgtcactgtaactataccaacactcacattcttcttcctccacagcatcacatctgcaactgcagattcatttcataacaagaaaaaaaaaaggctatagaggtgagagatcacctagcttttataagttttggatttggtaaagaaatgtattcactaaccaatgcctcctcccagaatctcatgtattgtcctgtctctgttgaacaacttgtccgaagaagaactcatttgagaagaaagatcagagcaaacttggattcagatttcctcagatgatcagatcccaaaagtaacccagatatgtatatctttctctgaatgtcagaaacagatcattatgtgaaaggaaatcctaaaggctcgaatcgaaggaacctgatgtatcacaaagaaagtaaaaataaaaagtgaagaagagactaaagttgggtcatcaccatcatcatcaaagccatcaactttgaatatacaaataattaattaataattcaaaggctatgctctgtttagggaaaaagaaggtgtttgttgtcctctcgatgtttttatttccagcctaaaagtgttatccttcttgtttttttcaaactgtaaaagttcgccagattgtacttagagatgaatcaaattttacaccatccttttatattttccatagaacacatttaaattggtcattcatctacttttagtcaactgaagtaatttatgtacccttttcagatgtagtttcctatgaattcgaaaaggtcgaatctttatcctcaatttaagattgtcagaagaatttaatatggtaaaaaaatcaaacaaaaacaattccacaaaccatttattatcctctgttttctatctttcgatgtaagcttttttctttctctgttctgtatgtaaaattgttgataactcttgataacaaaccaaaacaaagaaacaaaagtgaatatcccaccacctccatcaataacacttgttctctattttctctgctacttttgtttctcagtttccttttcagaagtgcccacagctccgagattggcctcagcagcagaagcatcaagcaaacttgctgcaattgctgccttcaagtcatcatcttccatctctgaaaaagcctgcacttcctcacgtgacaatgcctgattccgtctttgttgattaacattgtcattacttctcttgtttctggcagaagaacctgagctcgtgttctttcttattctctctgcgtcttcaggagaaagccactgcccgaaactattggaagcttcagaagaagacgacatgggacattcctgagggaagtttcctttcactatgaagatactccatcctgcgcctttgagagagtctaagaacgcagaaaggtagaacttcgataaatgttgcggggcagcaaggagactatcaaagttataccattcgccattcactttccttatacaaaaccaatggtcatgcaagtggcagataaaggcgctttcaagctcagggtctatctgcgcaggctctgcatctggacaattgagtggaattacttgtagatcccacacttccaaagctttttgcaagacctgtcaatcaaacagaagcattctcagttaaacgaataagcaaagactagatcaactttgcaagattaaaatgctacaccaatcgcataaaccctctgtttgcagtgttttatccgcatccaacttcaacgtaatccgttaaaatagctttaattttagatatctaaaaatgtgatgtaaaacaccatactatacccttgaatctcaatacataaatcttgcaatcaaacctgacttttgtagcaacctaatcaaatatcaagttatcaaccaactcggtttaaagctatccaagaaacaaaagatgataattgaatatacagaacctcactaataactaacatatccaaaacaattgagtcccaagataaaaaaaatcatctcaagttcctccatttatcagcatagcaatgttcgcacaatgaaactagccttcaacaaatgagttttaacccaaagtaaagatcgcaaattcacaccattactgatctcaattcttcttgaatctatctaaaaacgaatccaaccattcaaaagtttatcacttcagcataaacacagcaatcaaaagcaccataaaatcgaaaccctaattttgcctaaacttccaacaacacaataacaaaaaggctttacaatatataaatgttgaatgcaactcaagatttatcaatttcatcgcgaattcgtacctggatactaaaatcgccgccgagggaaacattgtgcgactcttcagctaagaaatcgccgggagcaaaacctccaacggcagcaccttcaagcataacctgacgctccttcccgtctagatcggcggcgacggcagccaaatcgaattcagagaagaaaggcccttgcaacaccgtgttgacgcagtgtacggcgcacagatttgactcttgaacctcgtgatacaacattcctccgttgcttgttcgttccatcgccgattaagatttgaatatcaaaattcactgattttgcgatgaatatattattattgctccgatgcaaaagtctcaaagagattgtgaagcgaagatgaagatgaagatgaagaaagaagaagaagaagcaagttaacagattatttaaataagaaaatgtaagggacggaaaagtaaatatacaataaaaggatgccacgtgtaataaccgactttctaggcctttttcttattttgcagacgagcccgatactgttttgagataggcccattatctcaaaattgacagaccaacttaggttccttgcttcccaagatttctggtgatctctttgatggcgacttctgataatgtgatgggtatgatcgggttggtttatgcctgcatttcgtaataaccacgtctgagagcactaatacagagttaggaattatactactgagagcactagcagcaatgtccgtgaacagtttaagaatttagataagttagtgacagatttaaagaatgagattctgtataagcttttacgccctctgattctttcatcaaggtaatacatctactacttctacctgtttgttctaaactcttattatggtctaaatttttccttcttagccatataattgcaaggctagagttgattatactttgttaaatgattaggtttggtttcatttccagatagtcctgctggctatttccgcttccgctcatttagtgaccaaacctggcttcatcgcaccaccacattcgtaaaatgacaaaaaaactttctctttttctatgtgcatatagttgagctcaataaaaagcttgtttctgactatatatatataaaccatgggttttactgaacaaataaaccccagaatcaaaatctgtttttgacgcttgcttgtctcaatcttgttagacaacctccaagaagccaagggggcttccttatgcatcctgatcttgagcattttccaaacagttcagatatatagtcaaaagtaaagacatcttcaaagaaacagaagaaaatacttgatctctttgtttaatgtctagtagtaagtttacatatgtattgacaataggatcctatgtgctttgctttttgttaagatttcccatgctgttgtttagtttttgattttatttcccagcttattgcttataacttccaatgtatataataagtttcttaagagcaatggcaaaatataggaggacatattatcagacggtcaaaaagctttaagcaaaaagctcataaaatagttaccaatagccttttacatataagtggaagactggaagtattcagaaatacataagcaaaaccaaaacaaacctaacacaccaacaacaactagaccacatacaaaaaacatttacaagcaaaacacttttcaaacaaatactgttaactccaaatatcttccacaccagtttcttgatcaatgtgctcgaccaacagctttcttgtatttgtagcgttttgaaatccagaggtacactaagaagttgaggaaactgagagttgccaacaagtagaaaaagtaatcaagatggcctcggttcaagttatccggtatccaacccggtttaccgttcttcttcgttatcttcatcacaaccgtcacaagaactgtgctcaaatagttccccaacgcaaccgtggtcaacgacaaagcagagcagagacttctcatggcatcaggagcctgatcatagaaaaactcaagctgacctataaaggtgaaaacttctgcacaaccgataagtaaatactgcggtatctgccagaatatcgacatatggatctgtttttggtcatatgcattgtgagttttgacataatcaagcctgacaacctccaagactcctgcagtgatcatggcaaagatggagaccacaagacctatacccatacgttgaagctgagtgaagcctcgttcattgcgtgtgaactttcttgccagcgggataatgaactggtcatagacaggagtccagaagagtacactgacagtgtcgaaaagtgagagtgaagctgatgggatttcaaagttttttcccatgtgttggtccattgtgtttccttgtaacacaaacattgtgctcatttggctgtacactgtggcgaagactattcctgtggcccaaactggaagaagtgtgattattgacttaagttcttcaacttgagtaacagaacatagtctccatggattgacttccccgtctttgatgctatcagattgactctcaaccgctgccttgtcaaaaaacctgagatgttttcaaaactttagatttgaaaacagagtatttttgaagttaggataaagattcaaactttagtttcttactttaagttatctgtgtgcacaagtttccggctacctttgatgttactctcatcatctgcagtttcaaagagcagagacttgtcctctggaaccttaacacttatcttccgaaaagccgctactataacctgaaagatcctagtaagtggactccctccaggtctctgaagtctgtaaaaacggcttccgaagaagaaaaagcaaaccgcgataaccatcgcgactgttggaacaccgaaaccccatccccaaccaacattcatttgtatccagacgagaacagttgcagcaatgagagctccaacattaatggagaagtaaaaccagttgaagaaagaacttttcttgatcttctcattctcatcattctcatcaaactgatcagctccaaaggacgaaacacacggctttataccgccagttccaagagcaatcatataaagcgcgacaaagaaaacagcagtctgactagaatttggatgacaagtatcagcattgcagttacctggtttaagtccaggaactgaagctgataatgtcaaaagagtcatacccttcaagagaaaaaacaaacttaattagttttaaccaaaagattcacatttttaaccaaaagataagaaacaagtaaaactcacggagacatagatgaaaacaaaagttgcaatagtccaatatcgtccaaggtaagcatcagctataaaggctccaatcaaaggagttatataacatgttccagaccaattcgtgacgttatttgcagccgtagcattgccttgattcagacggctctcaagataattcacaaggttagtgcccatgccatagtaggccaatctttcacagcactcatttcctacacaaaacacataaaactggttaatcttatatggatagatccaatcagggcccaagctatataataaaaaaatataatggccctttctttatttagacaatttttttgaagaaaacagagcagattttaggtttataactcttttttcatagtgatcaccctacaaaactaaacatttccaataatattttaaattttatttgttctctatcattcaatttgcttttaatcgtatataatctctttttaatcattacatttattatttacatgtaaatgtttttagtggaccttaaaaaacaggggacacgagaggccattacttaagctggtccaggtcctatacggcaataatgaagaaaaagattggtgaaacgattagaacgttaccgagaatgaagcggcaagctttccaatttccggttttctccttgtttgcaggatttttgtgaatatcaacagttccatcttgcgtatacacatctttttcttccatattcctaataaagaaaaatagtttagctttttcaagaaagatgtaccaaacacatacctaaagatccccaatttagagatccatacttcaggtataaggttatgagaaaacccttaaaaatatacgtgaaagaaattgactagtagatgcttagatcgaaatatgcagatgaagcaagcaagtacgaaattttcatgctctgaaattatagtttatgtgtgaccagatgaggttatggttgtaacttgtaacgaaaggaaaactcataaaagacttagaaaaaagggagaaacctttgtcggcggcagctgaatcagcggcggagacgagaggcaagaagagaaaagagtagccgagggcgaggaattacacggcacttgtcggagtaataatgagcatgagcttataaaaaagacttgcagagctctggtcccgtacagcttttatatccaaggaaatagaaaggagcgttgctcacttttcttctcatgtttgcagtttaaccctttgagtttttgtatatttcagttagagccgcaaggcctattgtgctatcagattttgatattatcttgttttgactccaaagtgtaaatagatcaatatcgaaggacgtgttaatcatccaccaaaactttagtggactctttttgttttttatccgatattacggaattgacattaccagaaagataacaagaaagaactcctactcaaaacaagaaagatacaagtgtgaatacaaacactttggtcaataagatgatttggagttttcttataaaattgagttcatactctttctttttttatttgaaacttgtgttcatactctaaatatcagattgtcgattttgaaaaaaaaaaatagttaggtttattaaatttggttttggttgatgtttgattttggatatgtgaaaataaagccaaaaacatcactagattcaatattcaatttggtggttcagtctaaatccatttgattaaatctctaatcactccctcgattaaaaacattgtttcagctttaaggtctcagtggatcttaaaatataaactagggtagtgatattagaaagataattaaaggtgtttgatttggttatgctaaaataagaggtgctaatgacaattagtaataaagtaaccgttgatctaaagattcaccgaggacgaatattaaaagatgcatgtgaatcgacatatgtagctggatcctgtttatctacgaggatttggctgtttatcgacttagttgttggacttgaactctttactccaaaagcccaacaaactaaagagacaaaaccaaaagtaaaatttgatgtttatgaagctaaatttgaaaaagaaaatatatctgaccaaatttgatatttataaagaaaacatatttgatgtatttaacaatttttaaattgatgacgtttagttgcaaacaaaataaataaataaataaaataggtaaaaaacagtgtgctttgattgcttttatttcattggaagtcttaccacggcttccatactcttgtagtcaacttttcttacatattcgtctaatcagttataccaatatatacttttgaagtacactaactagtttttgttttttttgttaaaacattaactagttgttgggatgtgacatcgagactatgatgtttcaaggtggattttgtgcaacgtgagtaagtaatctttgatcagtggtttgaactttgaactaatcattatatcatttgacacattttaaaatcaagaactaataattaactataaaacttcaacgttgatatgaaaggttgttgcgaggtccaactttaatagaataagtacgaaaattgttgtcagatctaactgaaaatataagtaaaagataacacttgatagatccacaaatcaatgatgtgcaattatatagaaatttggatcactcatatttgattattatttcacgggaatcatagtagttgaccttttgattctagtctaatccattgattcttcaaatccaattaagaaaaaccaatttgtgcttcaattcaaagcattcttttttttttttctttctgaaattaagatcaattctctaagctagctaaaacgtatacttgagagctgtttgggaagataactctctagaaagaaaagctaaaaggtaatctaggtatcatcactatcgacgacaactttgtttgccattaactttttaaaaagttgtaactaatctcacaacagatcaaacctgaaataagcgtgtagttttattttattttatcaaaaggttagataaatgaattaaaaattccttatttttgggcgtcaagaattcacatccacgaaaacattatattatgaccgctaaagaaaggttacatctaggctttttttttttttttttttttttttgttttgtgtatggtgaatggaaactccaattttcatttcttttcgccaccagatgtttccattttacataaagtcttcaaaattttctttggaactcccaaatccaataattgacatactcaacatgaactttattactcagttgtacaaaaaccaacggctttaatacggaataatgaactgatatccaaataagagttattgctttctcaaatggtttaatatctatttttggttaaaacctgtaatgagtactaaaaactgacgatggtttatctttgcatgcgtcatcttcacttgtattttgtttcttactttgtctgtctccttcatcggatggttgtggtcttttctggtttctcccaacctccgtttcaagcaagagacgacctttgttagacagtacttgatcagattcgaatttttcttcctgttcaaagacaaattgtaccaaaacctaagtaataatagttgatatttccttaaccaaaaaaaaacactagttgttattttagtgtaaaaaattaagtatattttaacgtattgaatgattgcctaagatgttgtagtcataccggaatttttccaacaatcatgtgagccttgtagaaaacatctttcacttgggtttcatcaccccaagcctcctcaaatttggttattagatcttcatttataagctctactcctttttccttagccttcatcgcgggctgccacgatctcaagaaccctataaaccctttaagcgaaagtttatgcggaatgtctagagtaataggctttccttcggaacccatccctatggtctcaaaaggaaatgtcaatgtcttgtaaccgtcaaatgctaaattcataataggagttctaaaaggtagagtagagtcgacaaggcgcttcattatgggatcgatctcatgcgagataatgatatcgttgtatacccaaacggcgattaggcctccttctttacgaagaacacgttttgcaacattgtaaaatacgttgaggtcgaagaaatggacagcttgagcagcaactatgagatccacggagttttctcccccgagtagatccaccatctcatcttctgatatcgttgttggagtgtgatggtaactgattcttgagtgtttgattgctcgttgaagttgtgcttcgtttatatcggtagccactacattctcgtaatgctccacaagctgtaaattatagatttcatggtattgtcaagcttagttcacctactatattctatatgtgcatgcataaacatcaataggcaatctgcaagaggcgagttcacttaacttattttgacaacatatatttcagtttataacttgagtggtgacgacagtaatacttatcactaggttgcaagtcttgaacaaattcacttactatacattatatatgtatgatatacccacaattccacatgcatggtctcatttaccgttgatgaaatattaatgttttgtgaatctagtaaaacaaaacaacatctaagctcagttttgtctttaatttacattttcttccaaatcagtctaagctcatttgctaaagactatataagttacgtaacttcatttttcctacctctttttgatgtaaatatttttttaaacattattttaggttaaaaatatctataaaaaattatgcatatattaaatacgtaataaaacagcaaagatcgttgactaaaaagataaaaataacaagatcaagaggctgaataacaacaatcaaatttgccgcaaccaagtttgactaatctttagaatgatagacatgatcacatgatgattcactgaaagaggccctcctaagtaaattagctaccttgttgctagatatttatcagcaaatctcagtatcacaaatcatactaactagaacttcatactaaaggaaaaaaaaaaaaagaaaaaaaaataaaaaagaacttcatactaaatgaaggttttcagattttcccaaatctaaattagaagatatatagtattataaagcttaccccaatagcagcctgaccattaccagttccaacatcccaagcaaatttgtggtcctgtgtccgtgcggcaattttcttaaaccaatcgatcggatatctaggccttgcgtcgagataagcttcagcctctttctctgataaggcagccattttcttctacgtacctctctcgttttctttccttggtttgaatacacaactaattcgttttctatttaaactctctcgagtcttgaatagtcttgtttctattaatatattatgaaaaagtttaaccaagtccaacttggcgtgaggtaaagtttcactgcaagtccttcctaagacgtcgtttaagacttttttgttttaatatattttttgtcgaagacaaaatagtcagtatatagttgtaaaccaatatgcaggcaatgcaagtttccacgaaatggtagagaaaaaaatgatttagttataatcaattttctttcaatctcgaaaaaggaaaattgtacatataatctgtgttttatctgtattagtgttaggcccaagttcattagctgaagtttcaagtcataatgggctcaattttgggcttatctcttgggtttagtttttacaagataaagttgataaagtgaagactaaaatgaggaaaagagagggtctcgagcgctttttactctttcttcttcacgagagcagtgtcgttgctctgatcttgtaactgtaactccggcggattttgccgtttatactggatttttccggtgtagtatgtgattcctccgatatagacgctaaaatcactgttcaccgtgaaactcgtacatcaaatttcgtcaattgcgtttctttatcgcttttgagtttcgactacaattcatgaaaccatgagtgagatcgtgagagttcaagagatcgtttctaaactctggaacctaaacatagcctccaaaaaatccccgaatctggttacgatcatatcgaatgttggttataatccttcgtttgaaactaatggaagcttcaaagatttcgtttctcgattactagctcgacgtgacagttaccgtataaggagattctctttgaaactacgttctttggaatttgattcagctaagtaccatcttgtcaacgaatgtctacgcaatgtgttgaatcgaggtgttttggatcttgaattggacatcaatgtcaatgaagtttacaaattgccatttgaggtcttcacttgcaagaaagttgtgaaattgaaactaggttctgattttgttattgacaatatccctaagaacgctttgcttccagctcttaagactctctttcttgataaagttcggttcattgataaaagtggtggttgtgcgtttacaaggcttgtttctgcttgccctgtgctagaggatttagtgatatataggaacaaccgtgaagattgggaatggtctcgcattgtgtctagtaagatccttaagaaacttactattcggcgtgaagactgggaagatcttgatggctctagttatgagtcaattagttttgatactccgagtcttgaatacttcgaatactttgatgttctccgagatgggtatccagttgttgatctcaagtcccttgttgaagctaagctagaacttcctctttttatggttggcgatacctacgatgttaagaatctgattaagggcttagaaaatgttcagattctgagcttaggcgttgttgacacgatgcaggtaagtgatcgctattgtttctctttaatatgttactgtagcttaacaactagtagagcatgaggaaatttaaatctaggaaccattgagatactaagatcatatcaatcttgctagtgattagaatgtttgctcaagtaatgactgacttagttgtttttaattctgtttcaggtgttttgtttcttcgaagaagcagtaccagtgtttgaaaacctgtttcatttatcacttagcactgaagtagatttctgttggaatgttctaccaattctgcttgagaaatctccaaatctaaagactctcaccattcaggtatgacctaagacccccaaaagtatattggacaaactaaagagtcaaaatcttcaatctcaaaattcctgtcttttctaggctttgcattatactactaatcactatggggatgagaacactgtttgcgattgtttggaggtgtattctttcttatcgtcctgccatattgaggttctaaagataacccagttcaagggagatatcggagagatggtgcaaataaagcatatcttggagaaattgccgagtcttgagctgttggaaattcatggtcaggtaaaaggagatgacaaaaagctgcagatcatgttggatctcctaatgttcgaaagagcttcgtctgaatgcaaagtcgaggtcaagtttccagtttgttttgcctcagcatgaacttccatatctgataagagaaacaaatgagcttccggtttgttgttgacatgagagctggtttgtttagtgtctttcttatccatgcaatttctgtatataacagcttgacatttttgtcatctttggctccttgttgtgtcgtttcttcgtgcctaattcacttgagtttgtaagagagatgctatagctattagctatcagctacgttaggtctactatgactcatttgtgctgtatgttattgttactttacagtttacacagtctatttgacaatttggtaaatgggatatgatttgactgatgttgtttgtttcggctctagtaacattgtagtttatatgttttatcaacgagctaaaaatatctcagtatatgcaatgcgcagagaactagaacaaagcttgatttaaaaaagaaacacatcataaaccaacatacacaagaactagatgattatggctacaagagactaaagttgttatatagattgtgtccagagatacaaatacaatacacacgaagtcattaagcattgacactcaattgttacaaaacccgaaaccatcacacataaacgtagccatagtcagataatgagaagagaaacacaaatacgtagccatagacagataatgagcagagaaatatagttgaatctcttttttttcacctagtaaataatgaaattgctaacaaaaaagggattttatttgtattttagtcaaataagtaatctacatagtatttttgcaaaattttttgtcgggatgcatttagatcaatttggtatccgcccattttaataattttgttcattgagtcttagttgggtcggttcaaataaaactcgattctagacctgttttaaaaacttttacaacggatatttccagattaaacaatattaataattagaagatttggttaacatttaaaactataaatcttctttcatctttgtttgaattttttaactgttttaaatcaatatataaaattaaaaataaatctcaagtttttatcctacatatattgtgattcgaaattttaaaaatggacatatgttatctaatggacgaaaaatgtgtgggttcacggttcaccgtttcacatcagctaaaattaaacaatgatttaaaatcatatcataaataagttcaacattaataaaataaataggttttttggctagacgaatttaacgaaacgggtttttaaatcaacattaataaaaaagtaatatatcattaattcactgttttaatacagattaaatccttaatttattatttttaacaccaccaatattaaacatatcaaatcagtttgaatagaaaatattgtataaaacaaaaaaaaatgttccgtactataatgttacttaataacaattataaattataaaatataaatatttcaaaaaataatataatttgtaaacttttatccataataaatagccattaaaatttaaaaattactatttttagaaaacaaattacgaattagaataagaaattacagaacatgatatattttggaacagaataatatggcgaacgattttgaataaatatttttaaaattttaaataatattaatatgccattttaatactagttaaatcttcaatttactatttacgattgtctcctgaacacctgttataccattagtaaaaaaacggatccatgaccgattgaccacgttctcgtcttcccccaaatctaaaaccctaaattctcaattgctcgtcacacttcgtcactccaccagcgacaatcgccgcagaaacctctacgaaacttgctacaatggagttttcatcacaagacgacgattttggaggagacgattccgctgctaatgccaccagggcttcaggtcccgacattaatggatttctcttaattcatggtttttgtttaaggttggattggacattaatttctcatctgtatcattcaggtaatagaagaagcttcggtgatcttgaagacgatgaagatgatattttcggatcaacaacggtagcgcctggtgttagaactgggatgattttgtctctccgaggaaggttattatccaatcctttcttcatgtatgagaaaaatctttgatgtataattctaactttcttttgctttttctctttggcagtcttaagaattgtaaagatgatcttgcttcatgtcaagtaagcattgttactgttcatccctaatctgtttgaattctataccattgctgtttatggttgcttcgcttttgcatctaactatatcgttttggttagaatgagctcgagtcagcaaaaacagagattcagaagtggaagtcagcgtttcagaatgagtcctttgttcccgctggaaaatctcctggttaacctctctttctcaattttgttttgtacatttgtatatgcgatgttaattcttgagcattcaatatgattctgtttggtacttttttttttccagaaccaagatttttgattgattatattcaaaacctaaaatcttctgagaaatctttgaaagaacaggtttgtacttgagtaataacttgtgtgtatatatcaatatgaaggtcttgattttcaaataaggtttggttgttgtttctctcttttcagttagaaatcgcaaagagaaaagaagcgtcatgcattgtacaatatgcgaaacgggaacaagaaatggcagaattgaaggtaattctcgagaaactcattgcctaccactttgattcctgactgatgctatcacatgttttcttgaccattacatagaatagatgtcgctaaacacagtcttgtattttgtatttctagtcagctgttcgcgatttgaaatctcaactcaagccagcgtcaatgcaggtatatagttctcccaatgttttgattctggaataatttatacaattgtgccaacaatacaaatcgtgaaaaaagttagctgttgaagtaacttggacttttctaggcatagtccgctttttatgccgtagtgtaccttttatgacggtcatcctcgaccttgatgcatgtagagggaaaccttttccttgccttttagatttcagtctgaatacgatgataagcgcatgtttcttgtaaacctttacctggcatctgaattattaacaagtctgaatagaagaaatggctataaattttgaattgcaatggtcatttagcagcttgtcatgatcagatagcagtgtagattatttattctttgtttacctttgtaggcgaggaggttgttactggatccagcaattcatgaagaattttcacgtctgaaggtctgcacctactcgtttctatttacccttagactactttttcataaggatgtatttgtcgtaatatatccttagataatccaaactgtatctacggaacaaaattccgctttcgttatgaatggcctgaaagaataattccttaataactgatagctgacactgtcgtagtagatacagttgaggacgaacattcccaactttttgttaatgtacatttgttgcagttaagtaaagagtagatgaagtttgattccatgtttctattatgcagaatctagtagaggaaaaagacaagaagatcaaggaactccaggacaacattgcagcagttacttttactcctcaaagcaagaatggaaagatgcttatggcaaagtgcagaaccctgcaagaggaaaatgaggagattgggcaccaagctgccgaaggaaaggtatagtttgttctactctcagtcttcaatctggaattatatgaattatatagtaaagcagtagtcttcttcaacctttgtaaaacatgattccctgaaaagggtaaagaaattgatgcttgcctatgttcatgtggaatggcagattcatgaactagcaataaagcttgcaatgcagaagtctcaaaacgcggaacttagaagtcaatttgaaggtaagtcatatgttgatattaagttatagcaaagatttttgtagagtttgcaatttggatttgaggatttttgtggaatgcaggactgtacaaacacatggaggaattaactaatgatgttgagagatcaaatgaaacggtgttgatccttttctcttatctcttaattcctcaagatttttcttaaaacggaagaatgattatggttttgttggaaatatgtgactttgataaatctcaggtgataatattgcaagagaaactggaagagaaagagaaggagatagagagagtaaagaaaggactggaaattgtgtctgagctagtaggtgacaagaaagatgaagttgatgaaattgatgaagatgcaaaagaagaaattgctggtggagaataggaatttgtagctttcaaaaaatgttttgtacattttgaagttcaaaatcacatttcttcattcgttatctgtttcatgaaacagaaagttctaatcttcatcttctattaatatgttttaattcgcaccattggtgtttcgatatcgatatgtggcttcccgatataactcgtgaagaatttgaactcgtcaactcacgcaaatcatctgagtagatatcagattagaccaaaataagtgagtccaattagttttccccaaaaacattcacagaggtcacgactttaggttaatctgttgcagttgtcacgaacgaattcaaaatccaaaggagcgggaaaaacgaagtgacgtggaagtatcttagcgaaagcatctctctctctctctctcacaatccatcatcttcattaatctgatcaaataatagggttaatcaaaagtccagaaaccaacacagttcaattttacgaaacctctcagaaatggagaagtacgagaagctagagaaggtcggagaaggaacatacgggaaagtctacaaagcgatggagaaaggaactggtaagcttgttgctctgaagaaaactcgtctcgagatggacgaagaaggtattccaccaactgctcttcgtgagatctcgcttctccagatgttatcaacatcgatctatgttgttcgattactctgcgtcgaacatgttcatcaaccatcaaccaaatctcaatctaccaaatccaatctctatctcgttttcgagtatctcgatactgatcttaagaaattcatcgattcgtataggaaaggacctaatcctaagcctcttgagccttttttgattcagaagttgatgtttcagctttgtaaaggtgttgcgcattgtcatagtcatggtgtgcttcaccgtgatcttaaaccgcagaatcttcttctggtgaaagataaagagcttcttaagattgctgatttgggtcttggtcgtgcttttactgttcctcttaagtcttatacgcatgagattgttactctttggtatagagctcctgaagttcttcttggatctactcattattcaactggtgttgacatgtggtctgttggttgtatctttggttagtagtctcaattatgcttttatgtttttgaattcgtctctctgcgatgtgattttgtatttatgctgtttcaatctttgaatttgtatagctgagatggttcggaggcaagctcttttccctggtgattctgagtttcagcaattgcttcatatcttcaggtattttgaatttaccttccattacttcttctggttttgtcctgtttcagtgtgaattgcatcactgaatgatatgctagcttaccaattgagaacaactgattctatatagtccaggtttctttgaccaattattcaatggatttagcattcttgaatagagactatgatctttactaatggttcctatttggttcatggaggttgctaggaacaccaactgagcagcaatggccgggtgtttccacactgcgtgactggcatgtttaccctaagtgggagccgcaagacttaactcttgctgttccttctctttcacctcaaggagttgatcttctcacggtaaataactccctgatgaccatagctttgttgcaaagttgctctaatattgttacctcttgcttctgcttccctctttttttcctaagctgaattgcttggttaaatctttctgattgagcttatgtttgtacaattgcagaaaatgctcaagtacaatccagccgaaagaatttcagcaaaaacagcacttgatcacccatattttgacagccttgacaagtctcagttctgaagttcattgctgtatctgttgtcatcgtcttggtgaatttaaacatttgatctatctttgtttccgacacattagtgtcttatgtttggtttagagatttgtagtctttcagaagaaactggtaaagcttgtattctcaagtgaatgtaaaacacaatggtgtggtagcaatgagatgattttctatcaatcgcttgtttttgtgtaatcatacaaagttgatgctcaactatctgaatcaagtcaattttgaaaattaaagtgagaccttacaggtggaataaagggtctttcatagaattgtcaaaacccaaatgttacgtacaatggtattagtgtacacaactggcattctgacgcgcacacttgcccacaaatggtttacaacacagatggctgctcaaagacactaagttaaaaagatttatcgctacacacaattgaaggaaaccaaatgatacattcgtagtagtagtagtagcagctaacgatgacgatgtatgtgaaatcaattggaccacacatgaacaaggccgtgtctgtttcctgtgtatatctcattgcgttcttcgtcgtagaaaagagcggttatgtcttccaaagcttcagctacagcgtttcttctttgctttgagttctttcccatacaattactgctgctgctctcatcatcttttggaggcccactgcttggtgttattttagctaagcatttcccagtcaatatattgctgatattgattgatcccgctggatcatcccacaaaacaccaataatcaatatccatcaatgagatttgttaggttataatatctggttaatattatcttgaggggttatttttcttaccatttccttctatccactgatcttcggtatctgctttgcagtacgagatgatcagatcttgatcacttgtaatgtagatattattagtgttacagtctggatgccatagaagatggtcctcaaaggaagtaacgagctctccgcgaaagttccacacagaaacgttccggttcctgaatgtcagaaacaactggttctcatacagaaatatgaatgcagacggtgtcatgaactcagctctactaacttccattagctcagcatttctgacctgaatttgtaaatcagaaaccaacttgataaagaaaacaagtaaaacaacagctaaaagattgattgaatcagacaaaaaatcaactcacgtcaagaatttgaagattctcattctcttgcttaacaagaagtttctcattgaattgttcaatgaagtcaactttcttgtttcggtgaagcaaatgattgaaggacttgagaacagtgccatcttctatcgacagaatcttcagaggaacatgactggcagctctcttgaagatcaataacattatccctggactgatgcagggaatcaaatgggcacaacagttagaaaattcacaagtctgtcaatccaatctagtggacagcacagttagaaaagcagcttgctcaatatttgcaaacaagaaacaacaaaagggtcaaagaaagatggagaaaagttacctgattttaatttcctggacatttttatctgatatcgaatatagcatggtgtagtttttcagatcaaacaccttgtatacactgcagaaacagctatcaggctcagaggatgaaacttgtcgtaaaaaaaaatttaggctgtgagactagaaaaataacctgtcctgcgcagaataagtcagcacctttccattgacatcatcaaactcaacaaaaccaggccactttaatgattcagactcaaaaagagcaaaccctgcatccggctgacctctcagaatatacctaatagttgattacaaccagaaacacacattagtttgaataacgcaacagacgacatgataccgatttggtagatggtagaaaacttactcaattctagtggatctgcatttcaaagagctgaaattgtctgaagcataaacagaaactgtgatgagagaatcattgttcttgttgtagaacaagctcctgatgacttcatctggactaacatttaaaaagcatattcttttgttcgactctgcagtttaaggtaaatcatactatcagtcacatagacacaaagctgagagtaagtagtcaagttacgataattacctctactaaaagctgcgcaaacaccagaatgtgcaagcgcaaaaacaatgtcccttgcagcaacaatctcaataactttagttctcttcatcaaaaacggtaatgcaactaaacagtgccctttaggatcgtgagtatcatattgctcctgaaatcaaaattcatcaagcaagagcagcttaaattagtactcaaatcaaatcccaattaagagagagaagcaatctctagggtttgggaattagggcaaattacaaaagattgaaaattcagaacataccacgagacgcatgttacgaaatctctcttgggcggtgctaatagagaaagctcgatctttacgagaagagatttctcttcgttgaagctttttaacactgttgacgaatccatcgggtcgagaccttttcttagccacaattcttcttccactacaaggtctagggcttgccgtaatccttcttccttccatctaattcttccttcttcaagcccaaatatttccaagtaggttttgaatttttgtggaaaccctaaaggatgaagaaaccctaagaggaaaaagaagaagcgagagagttgggtaatctctaggaggaagacgagaagtgacggctactacatgggagtgtgacgtaagacttttttgcagattcagattggaattaagctgatttcaatgattcagagctctttttttctttcaaaatctcaatttcgagcacgaaccagccgaaccaatccgaagcatcgtagatcgtagaaagataaaattaatattgaatatttttaaaacgcagcgtttaaggggttgaaagaaattaacttttatgggctgtgatggatggcccagcccaataaaccttgtgacaattgattagtttgcttgatagaattcttcgaaaatatttaattattttgttttactattagtatttttaaaaaattcatgagtcaactacacgaaaaaacgtcatcacatagtcacacatgtaagtttttttaattatacgaagtattgctttcatatacgaccatcaatcatgtttacaaacactataacaatcttacaccgttattttggttgtcaaaatccggcatcgacttattattttggaattggatatttatgtttatttgttattttgtttaccagccatattattttataagtaaaagtcattgattggttatccaatttgtaagataaaaggtttagaaatgaaacatcattaaattttgttctaatacattggactaaatcactaaaacaatctatttgagaatttgaatatgttctaattcatatgctattgttcaatgcgttttggtaaaaatactatagttgactttcaaaattttctaataattttttttaaaaaaactaaaaaatagagtaaatgtttaggtaaaagtatcgtaaattattggaaacttacttttcaatgatgtgattctaataacttctatcgtgggattaaaaaaatgtcagaaactcaacagcaaaaagtcaataaaacaaatgggcattcaaatgcatgatgaatttaataagagagacagattaaacgggccaaaatccagaagtcgtcccgtgtaaatgaagaaatgggcccagaaaaagacggtgaattagtcattgaatatgttacgtaataaccacacgaaattaggcaaaagcgacggatgatgcatcaagcatggtctctttacaaaagccatgtgaagtatttgatttctaccgctaacctcactttattatttttatcatctcccttcttccacgtccagctgaattaattaatgcacgtcttcgaaacattattaaaaatggtcaaatctcaactcaatcaataccgattttaataaaattcaactaacaaccatttttataaagagctgtctttacgacgttcgacgaacattatgtatgttttatacttttatccgtttttattttatttttctaaatacttattttatgaatttagaagtgtgttacaaaattaaattgagattccatttacagacatacaccaaaaaaaaaaaaaaaactagtatctcatcaaattcttcccaatttatgaaaatgtaattttcatcaattaactatttttttaaaaaatatactcgtggaaaatcaagaaatattaaaatgtaaaataacaaattattaaaatgaaatgtgtttgagtcatgtaattaaaaactggtaacgaatccgcgtacaaatagtggtctcctcctttataggataaaccaaaacccctgagaaactcaacagcgagagaaccacaaagcgtaacaaagagagtaataactatgagtgatttttcaatcaaacccgatgataaaaaggaagaggagaagccagcaacagccatgttaccaccacccaaaccaaacgcttcttccatggaaacgcaatctgctaacaccggaaccgctaaaaaactgcggcggaaacgcaactgcaaaatctgtatctgtttcactatccttctcattctcctaatcgccatagttatcgtcatcttagctttcactctcttcaaaccaaaacgcccaactactacaatcgattccgtcaccgttgatcgtctccaagcttccgtcaatcctctccttctcaaagtcctcctaaacctaacgctcaacgtcgatctctctctcaaaaaccctaaccgcatcgggtttagctacgattcgtcgtcggcgttgttgaattacagaggccaagtgatcggtgaagctcctcttccggctaaccgaatcgcggcgcggaaaacggtgccgttgaatataacgttgacgctaatggcggatcggttactctctgaaacgcagcttttatctgacgtcatggctggcgtcattccgcttaatacttttgttaaagtcactggtaaagtaaccgttcttaaaatctttaagattaaagtccaatcgtcttcttcgtgtgatctcagtatctctgtttcggatcgtaatgttacgagtcaacactgtaagtattcgactaagttataatcagatctgtagattctaccacactttgttcttgttttgttttttggtatttgaattggtttgtatttaatctctatgtatgttttatttactttaatgaacagagatttgattttgttctttttcgtcttaaaatctttttgagataatcataattgattcaacaaaattagtaaaacgtgttagtcaatgtgtcatatacaggtagatattttcttcaacctttttaaagtagaagaaaaagtcagataaagaatcaaatcagattcttaattactgtcacataatttaggcagattgtaaggaattagttggcagctcaaatcgcatttaaaacacttctttctctactttgatttatatttcttctataagtgtggcttcaagctctccaaatatacaaattaaaccatccatacattatagttttgtcatgaccaaacgtatgcgtaaatccagccggtgcggttgctgcacagcttcctgtatcatcttaaccattctcatcctcatcttcgtcattgtcttactcttggttttcgaagttcacaaaccgaaaaaacctataacgcagatctaatcacacaccgaactaggcgtcgtatatccttaccatttgatgttcagctcaatttcacacttattagtctccatattctagtcaagaatcgcaacaataagtttcaagcacgagatagggaagacattagtggtacacagagagaagcaacttggtgttgttgatcttccctcgggtacaatgccggctaaagtttcttcaattctaccttgtcttcttactcttcagagcgataagcttgtttcgacataagtggtatcatgctagatatattgggtggaaagattgtgttggaaacaaagacacgaaaagtcaagttgtttggaatcttcaagttgtaaaaccactactaacgactgtatttttcatccctactctctctctctctctctctctcgctatatctctcaattctaagttcaactccatctgaacatttctgattcttgaatagaaataacataagagagactaaatactacaacactcttaaccagaatgaactgaagcatcgatagtttcaactctaaagaaagcatttttaccaattgaagctcacaaaacaaaatgatctcatatctgcatcaacaactgtttttcaatattacagagcaaaagtgaaacaattgagcaaaataaaagagatattgaccttagacaagctcaatgtaagccattggagcattatcacctctccttggaagagttctgatgatcctcgtgtatccaccgtttctctcaccgtatctatcaggaacctcagcaaacagagcgtgaacaatctgtttctcgtagatatatcccaaggcttgtcttcgcttgtgcaacgaaccgtctttagccaatgtaatcatcttgtcaacgaacttcctcatcgcactagctctagctcgagtcgtcttgattctcccatgcttaagaagctgagtcgtgagtcctcgcagaagagctttgcgctggtccggtggtctgttcagcttcggaacacgtcgtccgtgtctcatcgcgtagatacgaccaccaccgtcaacaattttgaatccattctcaaagctttgccaatctgcgttcgaaattcgaaaaccctaacgactttggagattcaaattgagccaaatctctatgaaaagtggaaatttacctggaagtccgattgagaggagaggattgaccggagagagaccggagaaagatgggagtgaaggagaagagattgggagacgaagagtaaccggacggcgagaagacgaggaaggtaatcggagtgatgcggtggagggaagagctgatttgagagaagacatactccagactctgctcacggaatctgtaggagtcgccattgccatggacattggaatcgccattagattgtgatcctctgcaacaaagcggattttgctggtgttgaatggataagggatagaggaagaggactttgtttatcagaaaccttttgatgggccttaatgggcctataaactgtaactctgtagcgctttgccaacaagagactttttaaggtttttgttgccaaacagatatttgcatttgggctatgtaatgttagaattattttataatgtatgctattgctagatattgtttaagtgcatttgtgatttacaaacatttcatttttattttggttttaatgagcatttctattatagagactttgatgttaataaatggtgttctaagatatattaaaatattttatatactttcttaaaattggataaattttgggaaaatccttaatatcagttaaattgaagataaagagtattaaaaaaaactatgtagtaaaatacatttcacattttttgtgtataatagtacatggtattcgttaagatcactcaaaaattaacaaattaagtctaaaagggcagaaaagactattcaaatatggacttggagaaagacattcagctttttacgctgagaaactttcatattgagccgtgtgtttgtgttgtgaagagaagtaataaaaaataatttgaagtgaaaaaggagaagaaaaaataagatcgtagaaagcgtggatggtttcttcttgggttcactgccatgcgattattaaattggccatggggctagtgtttgacgtacaaaagtctaaaaattgtcagtcaaacaggtccaaaactttgtaagaaaaataatataataatagcaaattttctaaaaattgttaaaaaaagaacaaaagggaaaagatgaggatgcagatgaaagcaaaatgtcaaacactagtttcagattttatcgggaactggggtttgacagttggtgtatgtatgtaatggcctctcatcaaaacatgtgcatctttttccttttttgttatttactgttttagctctacgtcttgtccaattcctctcaagtaaaatgcctttaatatgatactaatatacaaggggactaatgctttttcccttttcttatccttgttttgtctaaatctttacttggattcctttatttttctcctctctttagattagtacggtttaaggaataccatctttctaattttagcacaaaattgcaagttggtgccccatcttagtaagcacatcgtaccacactttgattgtgtgagagacttcttcatcccatctctcataccaaacctaaatcaaatgactagtggtgcaacctgctgactccatatgaccataactaataaatcggtttatgaatccaactcatgtagctctatagaatagaaacccattcatttcacataatgaactgaatctgacattttatttacatcatttactactcaattttgtaattagcaagatcatctttttcattattcaacaattttgatattccataatttattaactttgtcatacatcataatattctgaaattttgttatatattgtaccggttccacgaaatagagctctattattatagaccaaacaaacaaaatattatcttcttgtggttagttcgagagagaggtcaagaagaaacgaaatggatcggcaaacggaagacgtcaaacacacaacgacgaacattttccgatcacccacctaatctcttcccatttttattatttttcaaaactcaaattaattaagaagaaaaaaacagaaacagagagagaaagagttaagatgaatagagatagaaagagtcattaaatgtacgaagcgacattcacaataattcgaaaggtggaagacgacttagatacggccaggcttcactgtcctcctcgtcctcctcaattacccctaacccctttttccgggattcatctccaacccacatccttccaaattctcaccccctcactgagtttttgctttttctcctcatcggagatcgtgaagacgatcaagtaatttaagaatcccaccattgataaaagagtctagcttttctactaccaaacctttttctgtttggaaattttcgattttggatttaacccttttcttaccttatttataaccatgcaatctcacgaccaacaacccttcaatctccatggcggaatccggcgatttcaacggtggtcaacctcctcctcatagtcctctgagaacaacttcttccggtagtagcagcagcaacaaccgtggtcctcctcctcctcctcctcctcctttagtgatggtgagaaaaagattagcttccgagatgtcttctaaccctgactacaacaactcctctcgtcctcctcgccgtgtctctcaccttcttgactccaactacaatactgtcacaccacaacaaccaccgtctcttacggcggcggctactgtatcttctcaaccaaacccaccactctctgtttgtggcttctctggtcttcccgtttttccttcagaccgtggtggtcggaatgttatgatgtccgtacaaccaatggatcaagactcttcatcttcttctgcttcacctactgtatgggttgacgccattatcagagaccttatccattcctcaacttcagtctctattcctcaacttatccaaaacgttagagacattatcttcccttgtaacccaaatctcggtgctcttcttgaatacaggctccgatctctcatgctccttgatccttcctcttcctctgacccttctcctcaaactttcgaacctctctatcagatctccaacaatccttctcctccacaacagcaacagcagcaccaacaacaacaacaacagcataagcctcctcctcctccgattcagcagcaagaaagagaaaattcttctaccgatgcaccaccgcaaccagagacagtgacggccactgttcccgccgtccaaacaaatacggcggaggctttaagagagaggaaggaagagattaagaggcagaagcaagacgaagaaggattacaccttctcacattgctgctacagtgtgctgaagctgtctctgctgataatctcgaagaagcaaacaagcttcttcttgagatctctcagttatcaactccttacgggacctcagcgcagagagtagctgcttacttctcggaagctatgtcagcgagattactcaactcgtgtctcggaatttacgcggctttgccttcacggtggatgcctcaaacgcatagcttgaaaatggtctctgcgtttcaggtctttaatgggataagccctttagtgaaattctcacactttacagcgaatcaggcgattcaagaagcatttgagaaagaagacagtgtacacatcattgacttggacatcatgcagggacttcaatggcctggtttattccacattcttgcttctagacctggaggacctccacacgtgcgactcacgggacttggtacttccatggaagctcttcaggctacagggaaacgtctttcggatttcgcagataagcttggcctgccttttgagttctgccctttagctgagaaagttggaaacttggacactgagagactcaatgtgaggaaaagggaagctgtggctgttcactggcttcaacattctctttatgatgtcactggctctgatgcacacactctctggttactccaaaggtaaaataaacattaccttttaatcactctttatctataaattattttaagattatataggaaagatatgttctaaaaagtggcttttttggttaatgattggggaatgaacagattagctcctaaagttgtgacagtagtggaacaagatttgagccacgctggttctttcttaggaagatttgtagaagcaatacattactactctgcactctttgactcactgggagcaagctacggcgaagagagtgaagagagacatgtcgtggaacagcagctattatcgaaagagatacggaatgtattagcggttggaggaccatcgagaagcggtgaagtgaagtttgagagctggagggagaaaatgcaacaatgtgggtttaaaggtatatctttagctggaaatgcagctacacaagcgactctactgttgggaatgtttccttcggatggttacactttggttgatgataatggtacacttaagcttggatggaaagatctttcgttactcactgcttcagcttggacgcctcgttcttagttttcttctcctttttcacaaacaatgtgcccataaatagatttacctgttttttttttgttatgtatcaaaaagagaggattttttgaagtcaaattgttctcactcacactctgtattggctacctgattggtggaatacatagaagttaatcatgaagattagaacacttgatattgaagaaaacacttgaaaatggtacatcaataataaaaatgataacacgtttaactgaaaaatcatttacaaatacacaattcttttgaaggctaccatttttttttttgggaattgttatgtattttttttttagcaacttgaattgttttggtttacttttttccaaaaaaaaaatatatacatgttgttttttatttttgttatggcaaagaaattgagatgtttggatttttcaattaaaaaaaaaaaaactcatctacgccttttcatatttcgcttgaacaacaacgaaaccctaatctggttaaagttggattcggccaagtccaccaccgtggagctctgaattcatttctcttgtaattcatcgatcgctgttgaatattttcaatttgagttcccacggtagaaaccattccgatttatacggctacttcatcgctcgagctctctcgtttctgtatcgatcgcagcgtatctgatttgtcaccggtttcaggcttgtttctctgacctctggttatcggctccctgattttgcgctctatctattaatcaatctcttattccaagtctttgttccgctgttatcacagctcatcttcatcttccattcactggtgtctttggtccggcgtcgttgtgctgctttcagttcatcacaggtattctcatttttacctgtttcttttttattgaggatttcgtggatgtgaccagttcaagttttttgtatgttactttgtatagcttttaagactcgattactgagaatttaggcctaatcgtcagctgaaaatataatgatctctactgttgtatgcattcttctcgtgcttttgttacttcatcgccaatgcatgtttttctactctgagagtgagagaatctctagctagttcctacaaagtctctttgtgatcagtgttgggaattcttaattatatatgcattaagatatacctgtctcagactctatacgtgattttcaggaaagagctttaaatattaagctttgaatattctctcagaccatcaaagatttgcttggtgcactggccggaaatggatcctagtcgatatggtcgtcagcaagaatgggataataacagtgtaattgtggttttctccttacatatatgggatgataaacaagatatttttagggatgttatgaatctcaactcatccgtggagtgagagacttgggagagtgaggatgtggatgggatttggctaatgtaatatccgtcaatgatgtttgttgctgacatagcttattctcttcaattcacaggctccggagggttatggtactcagcatgatccaaatcatcggtgagtgctagtaaaatggattacattgatgtagttgttaatttgttattgctcatgggggtatatttattttagctactgtaactaaattgtatttcttgtactttatttggtttggttacttgtgccgaaatattcatgatagttcatatttcatttttttaatatcttttctgtacctatactacattgctcttacaggtttggcgtatcatatgatgacggatatcctgatgaaaggttgatgcgggatgatgtctacaactatccacctggacataatactctgggtgacttgcctcaatctagaaagcgaaactatgaagaaaattatcccagtgaacttcgcaggcaagaaaagccttacatcgattcaaattatgctgctgactattatcatgatagtgaagctgggagtcgtaatggacattaccgtgatcatgaacacgaaaggtcgtccagatatgatggctgcgatgactattcttgtaatgataacaactatagatcgaaaaattaccatcatagcagagatgatggtcgtgaaaaagattatgattatactcgccgaagttatgattctgagtatgaaagggccagtgtgagagatggcagtcgaaagagccgtgatccgcaggacagagaacggaattctcgagatagagaatgggattcacgtgatagggagtgggacaaaagatgttacagccgcgaaagagatgagagtcctcataagagatatgagaagtcacgatctcgatctaccggacgtggggagttctctagatcaagatctcctagaggtcggagccatgggcggagttaccgggaggacagctatgagggggatcactggaatgaaagtgagaggcgaagagaatatgaagatagacataaccaggatcatttttctgctgtataaaatattctctcatccctggtctatattcttttgttgcgaagacatttaaaaaatccgttcctatatttttatggtttttgctagaccccatccgccactgttgttgtgaagggtctctctatgaaatcaacagaagaagatctataccagattctggtaaactcttcatttttttgaatctgtatgtcctcaggtttaaacaatttttcatgcatgacttcattattcccatgtgcatgctaggctgaatggggtcctttgcatcatgttcgtgttattcgggagcaaaattctgggatttctcgtggatttgcttttattgatttccccacggtggtatttgctttcaactaatctgttaattccttgcgctttttcttgtgatttcttcaacactgtgtgcatttatgtattttgtctgagcaggatgccgcacgcaccatgatggatagaattgagcatgatggtatagttttggatggaaggaaacttatgttccattacaggtctttttttaaataaacataagactttgattgatttagatattacctatggagggatcatagaattactacacatttaaattattgtttcttgaccgtttcagtatcagagtataacattcttacactaaattgcgtgtgttgtagcagccaacctactggtagggctggtgtgtcccgtaggcaggaacatgcttctagacgcagttatggtggaagtcgaaacatgatagttcccacagattggatctgtacaatctgtggctgtatcaattttgcgcggcgaacctcttgctttcaggttggtgcattgttttggatgaaagttctgtaaatttcattgtcaggactagagtataaacccatctgttaagaacagaaattacatatatttaattaccggaagaactactcattgtttggtgattctagagtctcaaacaaagtgataactactcatgatttggtgacgacaataccttaaaaaaaatagaaccgataaaactttcagaatatatctgttttttgctccttagagattatttgcagttccttttggtgacgaatatgtatcatcaattgacactttgtttgagactagggtggcatacatattttggtagtaatggtaaatgaacattttaatttaatgtcgacacattgatgtccatacctatgctagaatgtatttgtttgcatatacaatagtttgtttggaaatagagaaatttccatttttcaaatgtcaataaaaaaagaagtcaactaaaaccctttaactgatcttttttgatgggtttttaatttatctttccttctatttacttaaactctgtgaagtctttatcaatagtttaatcttgtggtggacaattgtatctgtagcccttctttgccatgccgctgtctgtgtcttgatttatgatagaacactcaaaagtcctaagttcagttataatatggaataacaaatttgtggccattgcataaatgtctgtgatctctgtctccttatgcagtgtaatgaaccaaagaccaaggattctccttcagcggatgtaggtttatcaaactctgcagcaggaaaacgaatttctgagacaggttctgatcagcatttttatttaagatgttttaaatttctttcttgagtcagaaacagtcgcaactgttaaggccatagtctttgtacttttctacatgccatatatacctaagatacattctgcttattttcttttccaggtccaactcatgtcctggttgtacgtgggttggatgaagatgctgatgaggaaatgcttcggtatgaattttccaaacatgctcctatcaaggttaacaaaaacccttttggattcgttgtctattaagatattgtactttatatgtcagttgacctggttttcctctttccgccattttgtaggatcttcgtcttgtgagagacaaattcactcatgtttcacgaggatttgcattcgtgcatttctattcggtagggtctcaaagccaagttggttgttgaacttactccttaaactctctcttctgcttcgcttttcccttactgatgatttaaattgcaagtgtgccttttgatcaaagatttattcgattgtgtagaaattagaaacccagtctagatgatcagtaccacctggtttttattctgcttgtgaagagtgattatgttttatagttttttttttttataaatgtttaagtgtctctttagtaatcatgatctactagttttgtgggtatttttggcaatgtttggtggtgagcgcactcaatcatttattttgtcgtacttttttataatctacattcgacaaccaccttttgcattgacttgtaaaagctcttgtagtagattatttatttcgtcactgattctcttaccaatttcatatctgaacggtgatcagattttgtagtagaactgcttgatatgtccaaatatctattttcccccagtttatgtgtgtatttgacttttttttaatccacctaccaacttgaaacagaagattatgattatgttcgtgtaggttgaggatgctactaaggcacttgaagcaacaaacagaacagctcttgaaaggaatggtaaaattcttagagttgcgtatgcaaagagtgttcatggttctggaactggtatatcagcaccctcgcactccaacaacctcgctgctgctgcaattgaagcagcaacgttttctcaacaggtacttgaagattgttttgatccagtttccctcgtttgtattggtgatcacacattgatcatttaattaaattttccagtatctttagatgaggattgtcattcttatgattcttctactccatgtgccctgacactcatgttggtccttattagtatgacggtgttggatgggctccaaaggaatacaatactggtgagaaacaaaacactggagggcaggcccagggtgttggggaaattgaatcccagaaagggacttctgctccacagtctggctatgtgtgggatgaagcatctggttattactatgatgcggcttctggatactactacgatggaaattcaggtcggcatttacttatattgttatttatttctttgaattgattgtatggttgggtagctgcagctctaattcccatatctggcattgcaaaacatgtaatgggcaaaagtaagattgatcctgttggctggttgtatagtcctgctatagatgtattctattataggataacttcttggcaaaaataagtcgtcagctctggtttgttcaaactatcctgttcttttttatgattgtggaattcttatactatgtatgcaccaaactagcaaacatcgagatacaatcaatcaatcatacaagtgtatgtcttaattagacttttaaataatggctgtagggattcagcaagtgttatatgattactattatggctgctgttggacttccaatggaagttttttcttttagttattgctgagttatgccttcttatatatgtgtatgtgccttaaaatttcgcatctgatatggcacaatgatagactgttttaatgatcttggttatcactaggcacctcttcttggtgtgtggtgatgggaaacttggtttcactggtataagaagtgggtaatattctctattaatcgtatgtttctaaatatacaggtctctattatgacagcaatagtgggctttggtactcgtatgaccagcaaacacaacaatatgttccttgtcctgatcagaacaatgagagtaaagtaacagaaaaccaaccagactctgccaagaaggagaaatccagtcaacaaaaggttattatctcggcggctactacccctaatgtagaaaaagttctgtccttaccagatgcggttcaggcggctgctgcagcagcaattgcatcagagaagagagagaaagagagagtgaaagagataaaacttgcatcaaagactagcctactcgccagcaagaaaaaaatgagtaacgttttaacaatgtggaagcagcggagccatgaaacccaaatacaacgtccctcaccctcacttggtgacaatccacctacagtttcggctgaagcaaggtcgtctttctccactggacaatccatgggcaaactgaaatctgatgtaattattgcgaaggagagaagtacctccaatcatggagtttctgccctgacaactgcagaaagctcgagcagcagtacaacaggaggaactttgatgggggtgatgagaggttcttttggaggaactttgggtggagcttcttcttcagctagtgtacaaatgccgccaatattaccttctgcttctccagcttcggtttcagtttctgggagtgggagaagaaggttctctgaaacaccgactgcagggcctactcatagagaacagcctcagacatcataccgggaccgtgctgcagaaagaagaaacttgtatggctcatcaacatcaagtggaaatgatgttattgattcaagtaagagcccttgactctagacttttctaaaaatagaatcctgaaatgaggtttttattgttgttataattgggaaaatggttcgtttaaatgaaggtgaggatttaatggggttgaggaaaggttcatcggatccaacaccatttcctcctggtgtgggtggacgtgggattacaacaagcaccgaagtcagtagtttcgatgtgattacagaagagagagcaatagatgagagtaacgtgggaaacagaatgctgaggaacatgggttggcacgaaggatcggtaactttaaaaaccagaaatttgattgatgggtaacgtttatatgttaatggtgattgttggattgtggtcagggtttggggaaagacgggagcggaatgaaagaaccggtgcaagcgcaaggcgttgataggagagcaggacttgggagtcagcagaagaaagttgatgctgagtttgaggttcagcctggtgacacttacagaactcttctccataagaaagcacttgcgagatttcgtgacatgtctgacaataattgactctctctgtgtgtaaagtcagttggaaacttctaaattccgttgtgcttaaactgtgaaagtgattttgattttgttctttttgttaaattattattaatgaaaagagacagattagtactacttgagtttatatggaccttaaaacctttgtattattaatgtatctggaggcaacaacgacccgaagacaacaacagtatttaaaaaacttaccaaaataatatatgctttcaaagcttttaattacgaaagttagctcacaaaaaatatcagataaatacaactgtttttgaaaatttcagaattctattttgttaatgaataataattaattgttatttcatgctcatgcacattaataacctaaaaagtattgtttgcaggtgttcgagaagaatatatgcattgatgtatatcaatttctaggcattacttttttttcatcataattgttagtaaaggtgacatgtaaaactagttaatctcgtgtctgtcattggctcttcccaaaaacagattggttaatacgttagttggaaccattgttataatggctgggtttagttgctgccggctatttccggataaatgcctcaaaagatctttcagtgaatccaccgtgatttgcgttgtcataacgtgagatgcaaatgaagagcttttctctgttaatttagtttttacacaaccctataaatatagttttacacttaaaacccataccaattatttttgaaataagttggtattgcccaacttttttatcaaggttttttcaacatgaagaaatgtgagtttttgattgattcaagtaaacgtaagttttgcaaaagggatgaaggaaatgtgatcactgatttattgatttgaatattttgatagggttaataacaggagcagtggtaatagtgttgattggattaggggcatgggctattgtttccattacacctccacctcctaagagatgcggaaccccaggtggaccgcctattaccgcccctaggatacgtctcagcgatggccgttatttagcctatgaagaacatggagttagtagacaaaatgccactttcaagatcgtctttatccatgcattctcgacatttaggcgtgacgctgttatcgccaaccgtgttcgccctgtaatgatttgatatctttctctcttactatttctcttatagagtatttctgtaattgcattgtttgtctctcagggctttctcgagaaaaatggcatctacgtggtttcatatgatcgacctggttatggagagagcgatcctcactcgagtcgcaatgaaaagactttagctcatgacgttgaacaacttgctgaccaactacaacttggttccaaattttacgtggttggatactcaatgggaggtcaagccgtttggggtgttctcaaatacattcctcacaggctcgcaggagcgacactgctttgtcctgtgaccaactcatggtggccgagtttcccagatagtttgacatgggagctatggaacaaacaatcaaaatccgaaaggttttcgatgctcattactcatcacactccatggctactctactggtggaacaatcaaaagctattttcaacaacagctgtgatgcaatcaagccccaatatgttctctcctcaagatcttgcactactgcccaaactcgccgcaagggtgtcttacaagaaccaaacaacacaacaagggacacacgaatcacttgaccgagacctgattgttggatttgggaaatggagttttgaccctatgaagatcgagaatccgttccctaagggtgaaggttcggtacatatgtggcaaggggatgatgatcggctcgtcccgatacaactacaaaggatcattgctcagaaactaacttggatcaagtatcatgagattccaggtgctggtcatatttttccgatggctgatgggatggcagaaactatcttaaaagaactcttgcctattcctcaatcatcttaaattcaattttacatatgtttagataatcaaaaaaaaagttgtacagtttgtctccaccccaaaaaaatagtattgctctgttcctcatgaataaatttcatttcattttatttttttgcgtcttttaaagtatttactgcagcgcagtaaaaagatttttctctggtaaaacaaaaccaatgaatttcttttatttggaaataggaaagctaatagttagatgacaacgtacctgcacctattctgccacatatatcgtatcttaaacttgcagttaaaggagatgctaatcataataattagtttgaagcagagagaatgctcacttaggaaggcctgtttcaggatcgagaagggcttgagtttggtcgtgaagcacgatgggaccttttccaggtctagtgcagataaaataactgacttctcctttttgatcctgagatccaatgttgtctttaatttcaggtggaggttgcagattctctacaccacttgctccatctaatcctgcttcttttagaattgaattatcgcccactacgtaactggtaaataaagaaaccaaaatcattacaaacagctttttagtcaattttaaaactcatagaaaaccgcagttaaacggatcacacattgttctgtgtctcacctcttcatatcagtgtctgacttagggggaaaatagtacagaagcccctggagcaattggactgcgacctttctgttgcgtgcaatcagtacagcatttggaccagcatcaaatgtgtaagcaacctgtacagatttacattttgagttattagttgttttcaaaaggttgagtcaagacactagaactttacctgtggtgtcccttcagaacggttccacttttcaactaagctaattattctggaaaagcagataacagtttgatatattagaataaataagggtttgataacaaataaactgaagcagcatatagaaatatgtcaaaatagagaatacctgtgtgaagtgtcattcatgtagaatatgggtggagatgtatccagacaaacagcatgaaactgattactatctgtacatgtcaattgtgtaaacgatgcaaagtctcgattttttatagcttcctccatttgcaaaatccgttttggcacaacttcctatagatagagaaaaaacaaaggatgaagtttaataggtaatacagaagttcattaaacatcaagaacagaacgtacttttgctctatgctgtaaaagcaaacttgtctcaacactttcacgcattccggaggtactgctcgtttccttctgccgtgaactcacctgttataaaaagtttgaatgaaggcactaaattttaacagatttctgaccattcgaacttgtccataatgctatattcacacgttgaaatagagcaactcaaaatcttgtcgtggaaatacttatttatatatctcgttcaatcaaatagtatgacgacagtaaaagtaacatatggttaatttgaaaaacagcatgatctggaagatgggagagtcggagtaatcctgccaaaaagtcacaatattttttaaaagagccataccacagcaatgatgataacaagatcatcccaatgcttctcatctgccagttgaactgcaacgctgtcacttccatcttctttgcttcccattgtccacttgacaaatccaccaaataaactccggcaagcacttcctgaaccttgcctacatgagcaaacagaaatcaaaccatgaatatcagtaccatttaattcctagaggagtgtcagatttcacttcactatcacaactcatgcattagtagatgactatacataaatcaaagcattgatatatagtgcaaggaagtccactacataggtacctggctattgcagaaagatggcttggatcttcatctacattcatcaactttgcaagagaaaaaactgtaggcaaaaaaaacagtttgacataaactacaagccattctcaagctcataatcatcaacagagagaaaaagcagaatacctagacaagcaaatccagcagctgaagatgctaagccagcagcagtagggaagttattatgagaagcaatatgtagattcaatttctcccaatctttcttccttatcttgatccccttttccatgtcttcaacatcaccagcacgacctcgtatttccctcaaacaattttggtacctacttccagaaagagatatttcctacactaacatgaaacaacaacaacaacaaaaatctttgtaattcgataattggaatctcagcaaaaggagagagatcgtgatgggaaatgaagcgagtgtaccttgccattgagccacattcgatcccgatcaaaagcaggactaacggcaacagtggtgactgtgcagagatgatcaggatcaagagttacgctaatgctatcgttaacggggagaatccgaacctcatctctctttccccaatacttaatcaccgcaatgttcgtcggagtttgcgccgtcaccatgaacacccatttctccgtcgccatgtgaatctccaaaagagatctgcagcttcaaagtagttgaaaatgaaagcgacggagaatacgacagaataatgatgactcattgcctttacaattttaaaaatattattttattcaaaaattgagaacttcactaactgtaaaactctaatcaaatggttattgccattttgatgaaaacaccaaaacttaacctaaaacgttttaggaaaaaaattgagttaggtaagaaataaccaaaacacgaaaatcattgtgatgcatgaactttatgcttaaaggcctttgagttgtcttgtctttgatattgggatatttgttagctgggaaaggatatgtaatatataaaccactgattcatataagtaacaccattgttcatgagtaaaaacagactcttattatagctcatacagcattggttaagataattgaagaaagcatctcattccaaatatccgggacaccgggcaagcaccaatgactgcaatctgatgaaggtccagcgatacgatggtgcttctcttcctcgtgcattgctctcttgaacaccgaaggatgaccgtctcttctatacgcagacattgttgtgatatcgtataaatacactcggtatttcattgtccttagcactttgttcaacactcttgactgttgaggcacgtggggtttggtggaagaagataaagaaggcaagggatgtttctggttgtagcacatctgaccactctctctgccaagaatttatgtacatgaattaatggtgtccattttgtatatatgttgagattaagaggagaatataagaaaaaacctcggtgagacagtgcggaaaatgacttttgttttggatggatcaagatttatctcaacccatttagcccatgtggttagtcctctctcataagcaaccattgggtccatagctttgaagatcttattcccatccatgtaataatcccacctaaaacatcaatagcttgcgttactgtcacaaatcccaaatctgatgtaaaatgagacacaataacaaatacaatgaacatagacgtctatgaaccgttatacactaatcatttgcttttgaaggaaagatgtaagtgtttattcagatgacttacgaactccatctctgagagtgagtccaccagtgagcggaatcgaatacaagaacatctacaccacgccaatatctagcattgtcttcgattgagtccaaatgtaacacccttttacggtcaactcctctcttgagttccacaagcagaggagcccaacaaaactcaattgatgtctcaaaatcctgtatagtaaccaaatttaatagttgcatctactaaccaatgatgtatatgtgattcaaaaggagatttgtgattattaattaccagagaatggaaagacatcgtaggaccattgtaagtgagcttcttacgatgagtgggaagaacagactgtactaagcagacaagagattcccactggtttctcatcattgaatctccaaccagcattattctttttcctctcattttcccaagaaatttcaatgcgtcaaacctaaacaccatcatggaaagagccactattttggttaatattaatgtctctttcccatttttcattagtcaatttattcatcttgcaattaaccatgcaaagccaatataaaccaacttttttacttgatgagacagaaattttaaaaagaagtaatgtaagaagtaagaggagtgtggagtgtgccttggtagtgaacaagccttagggatccatctccatttctggtaataagagtcgggtcttccatttctttggcaacttagtgcagaactcagatatggacagcttgaatcatagagcggatacgtttcatcgaacgtccatttccccaccgagtaatcacacctctcctctcttctttcacgcctcgtctgcaaggcgttgagtggatcatcgtcccctactagccataactcatcaaactgagacaaaactactttgccaaggatgagacacaaagataagaacaagactcgagtctctgaggtagccatttgaccaggaaactgagcagtgtgggcttggagaaagaaataatataaagaagatgggcaacaaaaagtggataaagtgaaaaagggcgttaattacggaaagtggtggtaattagtaattagacttatgcttgaaatcatgtcccgtgacttgcgtctcctcttctctccatcatatcatttttttataaaaacagattacagtatccaaggcgggatttgtgagtttggtggagcgttttgtatatggtttaaaaaatcgaaatagtttctcaacaaaaacaaacagaaatagtagaaaacaatccatataaaccagaaaaaagaattgcaaatcaaacacaatggtaggttttgtaagactaaagaaatgtaggttttgttgtagagacccaaaactctccctgccctcaaaaggtcatgaacagaccaaattcaggacccaaccttccttattaatagttttaagttaacccaaatatgtaaaaaagtattaatgaaacgaaaccaagacatggcaacaccttcttcagcttttagtatccttcatgctttatcaaactcacaccatccccaaacaaacataacacaaaacaaacactatgctctttggttagcttctgtcccaaacagatgtcatctttagtatgtcagtcgagattaagataatcctttagaaaatccatttttcttgatcatctgaagaagattcatctaaccatgattggtggatgtgcatccacgtcagcctttgcttttcctcctttcaattttaacccattttcagttatttttttccaatattatttaaccaatctaatcgtttgaaatcttaaaaggatcataaatcaaggtttaccttataactcagtaagacttttgttgaacaagaccgtacttttccctctgtaaacacgagctagacattagaacatggaagcaaacttctacagtatacccttatgatgagaaatcaaacaaatcagttgatcgtattttctgctaaatcatttcctagctcgataagtcacaagtataagccatgtaattgaagaacaagatttcttaccagataactcatgctttacaaattttgcaagccatgtatctgaactgatatgagaagacgtaacattatccaaccaaatgcgaaacttcttttccttcccatcaccgtataaattttccatctcatctatccattcatgtatcggtttctccactccagacggatgaacaaaaataccaagtggactctgaaacattgcaaaagcataacaattacgtcaactaataagtctacacaacacaagcaatcaagaacatcttcaaaattatcaatttgagcacttgaatttccattacgttagatgctagagagcttttttttgtcaaataaacacacttacagagagcgatttcaaattctgcaagtacttgtcagacttttccacctctccacaacgccatctctcataaaacaaataaaactgaacaacctcatgagcaggattcaaactttccccatggaaattttcagtgtccataacatctctaggagagacatttggtcccaaattaaacctctgaatagcttctatcataccagctccacacctctcagacgcatgaaatatttttgggttgtcctttgcattttcttcataccattgcaataattcttcatgcgaattgctaaccttaaacagtaaaaatataagcacaatcactcacgcgtagtcaagtatgatcgaacctaaaaaaaagtagttgggaactaaccattacgccatatacgtcagaaatgttgaaaagctcagcatcatttccagagtcaccacaaacaagtgtgttagaaggctgcttgccttcaatatccaacttgtcaagtagatatgtcaaagcaccttgtttgccagctcctcttggtaatacatcaaaagcatatccattactataaaccagcttcacatccacctataatgaattttactgtcatcagcaccaaaagtaacaatctatgataagaatgtagccatcaagctcacataaagagtacacacaaaaatctcaccccacgctcctctaatatccctggaagaaccttcattatttcaacagcgtcttctcttcccacgaaaaaactcactttgtgctcttcttggctcttgtctggctatcatagacaacacacagaaaaaaaaaaaaaaagagatttagaacatcaaattgctacagattcagcaggagatacagcacaaagaagatgatgctattatttgccagaaaactaaacaaaaagtctaagtcaacgcaggaagagacaagatatcaagttatcaacacaatagcaagacccacatgcaccagtataaaagaaagagaacaatttgataattcagcagagatagtgacaaaagaaggatctttatagaaaatcccaggaaacaagccatgcaactactcataccacaatgcaaaacaaaacaaaaaaatctagactagctaaatcctctaaacaaactatacaaacctgaggctcaagtttagggaatttaagagtttcctcaacaacaatgtctctattccacttataatccaaacgagcagtccaaacaacatcagacaccgttgattcaccgccgccgtatacaatctcagaacccacagaagttacggcgatgtcaggagtcaacaacggtctcttcttcctcagactcgagtaagaactgaaagacctcccggtgcaataaacaagcaatgaatcatggcgatagtgagcttcccaaagcgcattgaatctaagaaggtcattgttttcaggatcatcgtgatccacctgcgaatttggtgagaattgtttaattttgtggaatctaagagacgaattggaaatcagaagtgtgagtgagagaggaaatagaaattaccaatgtgcaatcgagatcagcaactagtatgagacgtggtggtccttcaagcctatccatcgatttcaggaacccaggtgtttctctttgcttctctcttgtctctttgctcaactaactttttggttcctttattcttgacttccttgggaagacgaagtttttcttttcttattcgaacaattctgtcgagtatttgaattagttataatctttctttttttaattagttagaaatttccttaagcacgtatttatataacatgtcaacgcaacgaagttccccctcaaaattcagttttatgcgtgcgttattacgacatgatagatcctgacgaccaccacatgatgcattactagcaatggatgactcttccttatcattcattttatattcagagaaaatgtgcaagagaatttgcttggtaagtccattggtgacaaaaaatcgatttagtttgagtggaaatagagaatcataaacaataccaaaattgttagagatgtatgtagtgatacaaaaaacgatattaaaaatatatattgttctggttctattatttgttatcgtttttatgattggtaactattaataataatttttcaattatagtggtaagaagttatcaattaaagtcttgttcttttgggtctaactttggatccgattgttaacctataaaagaatacaaggaatgaaaagtaacatgactaaaaaagaacaaacaggaaaagaaaaaattataaaataagaatacaaaagaatgagtgtagaagaaaaatagaacaaatgttactgtaaatgataaccaaaacatagaacaaatagtaacaaaaattaaaaaataaataaattattttcttaattaaatagccacgttttcacgtttttttttctaattttctataaatttaatttttaattaataaatgtttaatttgtttttctgtttgttcctcatcaaatttgagaaggaacaattttcttctacgattcctcaaaaaataaggaatgattaggaatagtgtggggtctacatgttacaatttggaaaaaaaatactactgaatggtaaaaaaaaagaggaacatgttgttcctgtccattccttttctaaaaagtggtcaccaatcggaccctttattgtgatttactaaccttttcagcggtaaaatattatcgttacactttcacaaataatttgctagtaacgttaagtgttagtgacttatatgagattgttcaagtttattcgacaaatgaaatcctttcgatctttactttaatgtgtcaaatatcatgtccactttcaaataaagactcttagcttgaaggaaaactctacgaaaaactaacgcaatatgtcccatttatatggaagacgcgcgatgttaaaattagatactgaaagttggagtctaatacattagaaactaatgatcattcaagaaaaccatagattatcacagtgacaataggcacaagtcccactccggctattacaagcattgttagaaaaagtttaggtgggacaaaagatcacaccttgcatttagtcgttacacgaccatccatcaaatagaagagatcgaagatcagctggaagaaaagctagttttaaaaaaaattcttacttgatttgaacataatacgatatgattaatgtgtcttaaaaagcatagaaaaacacatcgaaggccataaacgtgagaacgattcaaatgacataatttttacaagaacaaagaccagcaaatccaacttaccaaaaaataaaaccaccaaatcctagaaggcaagaatgtgtggcaaaaaaagaaaaagaatgtataccatttggatgggaggtccaaaattttcttagaaattagtaacttaaacttttaaaactcatacacatatggattatatgttgaaaaaatcataattcagaaaaggatcatatataactactaatatatttttgaggtctttgtttttagttattttattttattttcttaaactcgaggtctttgttttaacaatttttctaatttcattatcttacaaaaaatctcaaattttaataatataaatatttgtcataggtacgggaagagcggtttgttttccagcgaaaaaaaaagaacggtttttctctatttgttgttgttgtttttttttaattattttcgcccctgattttttttaattaatgaatataatttttgcaatttttcgtgggaggctaaaagaaaggcgaggaggaagaagaaggaaccagcattatatatgaagcacccaaagcattctctgctcttgagaacctcgcagccttttccaggtattaaaacaaaaccctaattttctctttctcttatcaaatttagtattcttctctttctcggattttccctagaaattcacgaggatgaagatgagaaacgcctatcccgacccaatcgaattactaaaaaagctttaacccaagctttttgattttctatatccgaatgcgcgatttcgatttctcttttcgataattttctggtcattgatttacctgcagagtgtgtgtgtctgtgttgtagggttattagttttcgctaagtgatttggatgagcttggatgtggaagtgaagctaagaggaggttcactcttgtcatcgtcatcatcaacgttgttgtcattgtgtccttcatggcacagcaacaatcttcccgactcaatcgtctccttactttgttggacagtatcctttatttttcctgattatttcctttgttaccaataatgcttcgtttttgttgttgcgtttcttcgtatcataatcgcttaagaaggtacatgttctccttaattatcatttctttgtagctggttcaacacaagctactcggctaactgcagccaagcagatcggggatattgcaaagtctcatcctcaggacttgagctctcttttgagaaaggtatagtcatgggatttactttctatagattacagagatacagggctgtggttgattgttatactgatgggaatcaatgacaattgctagtgaaagttacataaattacgcgtccctagcttagatgctctcttggtctttgtaataaacctactattcttccgaatgtgctcaatataggcgggtggacagagtagaatctatgatgtgttgtgtatgtcctgagctttaaatctcaaatttattgctgggaacaaaggtgtcatcccctgttcgatgtgtttacttcttacatgtcttatatacatcacaagtccctgcatggctagagaaagttgtttatagagctatacacatctatgattcctaggtgcgcctcctattgtttgacacatagttacaatacatctttaaaaggctgttgtctggattgtacccagcagatcctttgttcgcccatactgattctaaagaatgtcgaagcttaagaaaaagaatctagtgggcttccagaatgaaaatttaagtagggtgcccacctgcctatcttagtttcaggttttaacttgcaattatagagtttctattattagattgaagttcaagctttgttaggacatctgatcttattcataaaataatatttctaatcaggctagggtttgtgttctggagaccttgtttctgctacttttttaggtatcataaataactatttcgtcttggcattgtactttaggtttacatctttctaaactgctaagtcgtcctttacattaaattcatctatttgttcctttggcttaactctacttcttcgggaattaggttttgcatcacctccgtagtaaaaagtgggatacgagggttgctgctgctcatgccattggtgccattgttctgaatgtcaaacatccttcattgagtgaactgttaaattctttagcaacgaagttgggtgaggcagggatatctgataatgtagatgaagtggtggctttccgcaatcttcagtcaaagattctggcaaatgcgccctttagaaggttattaatagctctattacacaatacatatgttttttatagcatctactgttaagacttcttagctggatttttagatgtctttctcatgttaaggctgcacgatgtcttttgatgtctctaacatttggcatgtgctaacagctttgagatgaataaggttttagagtttggcgctttgttggcttctggtgggcaggtaatttattatttgctattgtttacttgtctaggtcattttgtaagatttcagccgatttatctctgatgtaaattcttcattgatatattgtcgttaggcctaatcaaacatctttatgaaattacatttttgtctgtcttaaatcgtttgtgataagtaggccactggaatgacgtaagtttgaacgcaatctggttagattctaagaagtgtttaggtttaatcaagttccctctgcatcacaaagaaacatgttggatagtcgctacttttgaattctatacgcttttgttgttgaggatcacatctttagcatgattaaaactatttgattgaaactattagcaggcttttatcaccaaaaatatcctttgtcagctgcaacctgtaaaattgtttcctacagtttcattatttgaccttaagaaattttatggcttggtttgtaactaactatttcagcacaatctgttaatgcaacatgataccttgccttcgttctttttctttgaactttcggtttaggggagcatgttaaacctttattgctccctttatccatacctttttttcttctcaaattttgttgcttttccctttgttgcaggagtacgacattttgaatgacaattccaagaatccaagggatcgagtggctcgtcagaaaaagaatctccgacgacgtctaggtcaatagcttgtctcgttttctattaatcaatttccatggggaaagtattatcagttgtccaatttcatgaaatgtgatatacgtaaccaggatagattataggtataaattttgagaaatcagtatatgcgtaaacccattcttctaagtctattacatcacgactattggttctctgattctctgtaaagttgactctgtatgctccaaatattaatgttttacttgattgatgcatctattgaacatacttctgaaaatctgtgaaacaggtttggacatgtgcgagcagttcatggatgtcaatgaaatgattagagatgaggatcttattgagcagaagtccaatgttcctgccaatggggttgggaacagattatacgcaaactgttctccacatcatatccagcaattcgtttcaagaatggttccccgcgtcaattctaggaggccaagcgcaagggaattgaatttactgaaacgaaaagcaaaaataagctctaaagatcaagctaaaggtagctgcgaagtagcagatgttgagatgtcatcgtctcatgttgcctcaacctcaaaaagaatattgtccgactcattggactcgagcaaggtatttggataatgtatactcataatgacggataaccaacttacataatatgagttgctgaacgttagtacaaccaacttgaagtctcattagttcattgatatgctattcgtggattcaactttgacttatgctgctttctcttaggtgtataatctcttacgattgtatagtccagacataggcacaaacttcacttgaaaatagaataacagttgtcatattttgttttagcaataaatctcaagctgcgtgaggaaatttccttattagaattctaggcacttcttgattttggcagaccatatttcatactgtcttttcacttctgtatatgctacttgaaacttcgtaggcggacattggtaatgaggatgatatcgagcctgatggggatggaaaatggcctttccatagttttgttgagcaacttattcttgacatgtttgaccctggtaaggttcatgtacttgtgccgtatacattttacttttttccacttattgagttctagtaaagttgactaataatctgataatgtgttcagcatgggagatccgccatggaagtgtaatggctctcagagaaatattaatgcttcatggtggttctgctggagtgtcaacagaagagtttagttcagataatgggtttgagttgaaagacgtcttgaataaagtaacacgagaaagagaaatcgacttgaatatgcaggtttcagaaaatgagctggagccacttcggaaaagacctaagattgaagatccatcaaaatcttttattgataacactgttttagaagttattgggggtgactatgatattaatgttaaagatgaagatgctgagtttttgctgccaccagtgaaggtcaatggtcaaactgactgtagttctacgaaactggaacctcaatcttctatggatgactcgacatctcactctgaaataaaccatgtggcagaggttaacaatcattttgaagataagagttttattgaggagccagttatacctaagcaacaggaagaaaatctcgaagtgttggatttggtcaaacaagctaggcattcttggataaaaaattttgaatttctccaggattgcaccattcgcttcttatgtgtgctttcacttgaccggtaagactttggttctttatcctaggttttcttttccatttttagctgtttctgcttcatggtagcacgattgtttagaaaggttctgatactggctgagatttggttgatcctttcttagttaatgattagctttccctcgattgcagatttggggattatatttctgatcaggtagttgctcctgtgcgggaagcttgtgcccaagcacttggtgctactttcaaatacatgaatccctcgttgatttatgagacattaaatatcttgcttcagatgcaggtaatatatatagagagagattgacttttttaacctactcaaaactaagaaacttgttgcagtctctaataattataaactgttggtaatctttatcatttatatttgttcagcgccggcctgaatgggaaattcgtcatggaagtcttttaggcatcaagtacttggttgctgtgcgacaggtaatattccagcacataagagctgattacacatgtttggaaaactgaaaaaggacactttcactgtcttgttttgccgttttcttatgtcttgagaacttatgcttttctatcatgatatgtagtagtttttgattttctgaggctctatttagcttatttgacttcttgatatgttcttggtttgtagagatgcatttccagtgttagcttttctttcttattctccccgttttttgcaggaaatgctccaagatttgcttggctatattcttccggcgtgtaaagcagggttggaggattctgacgatgatgtgcgagcagttgccgctgatgctcttataccggcagcagctgctattgtctctttgagaggacagacattactttccattgtcatgctactgtgggatatcttacttgagttggatgacttaagtccatcaacaagcaggtaaacaagtgtaaaattacatgctaaccttttcattatccaaaatccttcttttcttggtatttggagttttctgtacgagatcaattttgacctagtgaaatatttcttgcagtattatgaacctcctggcagaaatttattctcaagatgacatgaccctagtgatgcatgaggaattatcactgggggaggaacaaaatattgaactcaatgaaatgggtcatatcgagagtattggagaaagaagagatgtaaaggaaagcccttatgcattatcaggtttggcccctaggttgtggccattcacgaggcatgacataacatcagttcgattttctgctattcgaactctggtgggtttctgttgtttattctacaaaagaatctctctcagtacttgcttcctatgtttgtagccgcttacatgtatcttgtgccttgagtttctatgccctcagaatttaacagatgcaaaccctgtttgtttacctcagaatacactttacttatgtttcttcatatgtttatagtgtgctttcctaaattttcccctggcaggaacgacttcttgaagctggatgcagaaaaaacatttctgggcagtctaaaagttctttttggccatcttctattttaggggacaccctgagaatcgtctttcaaaatcttttgcttgaatcaactgaggagattctggagtgttcagagagagtgtggagactattggttcaggtacttagtaataaaattttgcttttctttgaaacacctaaattatttctatgcctttttctccttcttctgcatccttagaaattaaaggatcttcgttcttggtttccagtttgcattcttacttgggcctagattatctctcatttctcttcttttttagtgcccagtggatgatctagaagacacggcaaaattctatatggcttcgtggatagaacttgcagctactccttatggctccacattggatgctacaaaaatgttttggccagtagctccccctcgtaagagtcatttcaaagctgctgctaagatgaaagctgtcaaacttgagaacgaagcttctagcattctgggatttgattatgcaagaagttctgcttcccttgaaaaacaggaagatgcttctgccaggtccactaaaattattgtcggctctgatatggagatgtcagtgacccgtacccgggtagttacagcatctgcattaggtatctttgcatcccggttgcgagagggttcaatgcagtttgtggtagatccactgagtagtactcttacttctatgtccggtgttcagcgccaggtatgcatctctctatctcaatatctcgttttctctctattactagacatctgttgcgtttttcgaactaaaccgctggctctgcaggttgggtccattgtgctcatctcttggttcagagaaactaaatgcaaggccccttctgatggaagtggaagtttgcctggtttccctagtcctctgaaaaaatggctgctagatttgttagcttgcgcagaccctgctttccctactaaagacatatttcttccttatgctgaactctcaagaacatacactaaaatgaggaatgaagcttctcagttgttgcatacagttgaaacctgccattgttttgataagttattatcaacgaataaactcaatgtggagagcgtgactgctgatgagacaattgactttgcatcaacactagatttgtggaacaaagaaagtgctggaaatgaatccttagaaaagcaagtttttgaagacgtggagtcatctaggcaacagctattaagtactgctggttatttaaagtgtgtccaggtacattgggatctatttttgatacaattcatgtgctattttaaatcttgatctgctagattatcatgtcatataaattaaatgtttccatttctcgattgaaccatttttatcctatatctggacttatgtttatgcagagtaatctacatatcacagtcacctccctggtcgctgctgcagttgtttggatgtcagaatttcctgctagacttaatccaataatcttgccgctgatggcttcgattaaaagagagcaggtagcaactaaaatctaaatgtttgttttttcgttcgctgaattgaacactgactctgtgctgtttcaaggaacaaatactacaacaaatagctgctgaggctcttgcagagctcattgcatactgcgtagatcggaagccaagccccaatgacaagttaatcaagaatatctgtagcttgacgtgcatggatcctagcgaaacacctcaagctagcatcattagctctatggatatcgttgatgatatggattttctgtcctcacggagtaacacaggaaaacaaaaagcaaaagtcgtgttggctagtggcgaagataggtctaaagttgagggttttatcacgagaagaggatctgaactcgcgttgaagcatttaagcttgaaatttggtggttccttgtttgacaaactcccaaaattatgggagtgcctcactgaggttcttgttcctgaaattccttcagatcaacagaagattgaccttaaaatagaatctatttcggatccacaggtcttaataaacaacatccaggtatacccagtgaagtgtttagcttgtgttttttgaaggtttagtttgaggataggccaaaaacgaagcttaatattgaatatgcagagccttaacatggtgtacttttatattttatgttttccaggtggtacgttcaatagcaccagtgatggaagaaacactgaaacctagactgctcagtcttctgccttgtattttcaaatgtgttcgccattcccatgtggctgttagattggctgcttctagatgtgttatgacaatggctaaatcaatgacaacagatgtcatggcagcagtagtggaaagtgctattccaatgttgggagatttaacatgcattagtggtagacaaggcgcaggaatgcttattggtttgcttgtgcaagggctgggtgttgaactggttccatattctcctctattggttgttcctctcctgagatgcatgagcgatgttgacagttcagtcaggcagagcgtaacacgtagctttgctgcccttgtacctatgcttccattagcacgtggtgttccccctcccgtcgggttgagcaaagatctatctagcaatgcagaggatgcaaaatttttggagcagcttcttgacaactcccatatcgatgattacaagctttgcactgagctaaaagttcaattaagaaggtattttagtctagattaaatgaaagtttcttctctgttctgagtgtctcatggtttctgtgttgtctttctgatttggtcgcttcactggcttttttccttggttttctcatttgcatctaaacaaaattgaggggatggttcgtgagaaatggtaggacattgaacgtattgttgggttgagcagggttgaattcacgaaatttggtcttgacttagcctggtccctggttgatagggattagacgcattttataatctatatttttatttctatattgttgaattgaactgagtgggaactttattgcttttgaaatattattgtggaatatttatcagttttctgtttccaggtatcaacaagaaggaatcaattggttaggattcctaaagcgttttaagctccatggaattctctgcgatgatatggggcttggtaagactcttcaagcatctgcaattgtggcatccgatgcagcagagcgtcgtggttcaacagatgaactggatgtttttccatctataattgtttgcccttcaacattagttggtcattgggcatttgaaattgagaagtatatcgacctttctctgctaagcgtgttgcaatatgttggctctgctcaagaccgcgtttctctccgtgaacagttcaacaaccataatgtcattataacatcttatgatgtggtccgcaaggatgttgattatctgacgcaattttcatggaactactgtatcctggatgaggggcacataattaagaatgctaaatctaaaattactgcagcagtcaaacaattgaaggcccagcaccggcttatccttagtggaacaccaatacaggtttcattggagtgctcgacttcccagaaagtttagtacgcgttcttttatcttgagtgatattgtttcctttttgcagaataatatcatggagctgtggtccctttttgacttcttgatgcctggatttcttgggacagagagacaggtagcgcttatacattttccctgtttttatgttgttacaaatgaccaattttcagggtcacttttgaaagttatactttgaagaagtatttttggatattctttgttttcataaacgagacatatgtttcttttttgggcagtttcaagcatcttatggaaaaccattgctggcagctagagatcctaaatgctctgctaaggatgctgaagcgggtgtactggcaatggaagcactccataagcaggtaatgctgtttcttgagttcatcttttccgacttcttattttccgttgcaattgttgagaattggtaacatcatgacctgataaaatcttcaaatcacgtaggttatgccattcttactcagacgtacgaaagaggaagtcctctctgatttgccagaaaaaatcattcaggacagatattgtgaccttagtcctgtccagttgaagctttatgagcaattttctggttcaagtgctaagcaagaaatatctagtatcataaaagttgatgggtcagcagattccggaaatgcagatgttgcgccaacaaaagcatccacacacgttttccaggtatattattgtttgctgcattgaaggaaacactcccacctaacaattttacagtatggggagacctgatttttgtttgagttttaattttccaggcactacagtacctgcttaaactctgcagtcatccgcttcttgttctaggcgataaggtcacagagccggtggcttctgatttggcagcaatgataaatggatgttcggacattatcactgagcttcataaagttcaacactctccaaagcttgtagctcttcaggaaattttagaagaatgtggaataggttctgatgcttctagttcagatggcactcttagtgtaggccagcacagagttctgatatttgcacagcacaaagtaattacatatcgattaatcttacatctctgatttcttccatttttccgttgggtttgtttccttacaagattgtccaagacctaaccatgttatgttatgcaggctttgctggatatcattgaaaaggacttgtttcaagcccacatgaaaaggtgagtttcaacttgtggatttactctttttattgtcagtatatttctattggaggactttgtactgattaggtctcctaatttgtgacttgaaaagtctaaaactgatcagcctttttttcgcttaagttgatttgagcttagtttgttttttctaattccatgttcctctcttaatatatatccttaaatctggcttctacaatatattgcttatcggtctcaccttattcttacaacagtgtcacatatatgcgactagatggttcagttgtaccggagaaaaggtttgagattgtgaaagcctttaattcagatcctacaattgatgttctgctcctgacaacacatggtatgctttttcaattcaacaaagttctgctattgtgagatgatattgtaagcaacttctctgaattaaatcctttctgatccttcagttggtgggcttgggttgaacctgacctctgctgatacacttgtatttatggagcatgattggaacccaatgcgtgatcatcaggtaaggatttatatttttctttggcttacgtccatgtaaaatttcactttgcaaggaggaagagttccacatctctttcgtttttgattggaaagaatttaaaatagtatcggcacacacttggatagtgtattattatttgaagtttgctaatatagagctgaacaaactctggcaggcgatggacagagcgcatagattgggacagaagagagttgtaaatgtacaccgtctgataatgcgtggcacacttgaagagaaagtgatgagtctccaaaaattcaaagtgtcggttgccaatacggtaatcaatgctgagaatgcgagtatgaagacaatgaacactgatcagttgcttgacttgtttgcttcagctgaaacgtctaaaaaggtatgctattcatcttatttaatagcaattctctaacgaaagaagaagattgataatcctcaataatcggtctttattgtagggtggtgggtcttcgaagaagggatcagaggataatgatcagattgctggaactggaaaaggaatgaaggcaattctaggaaacttagaagaactgtgggatcaatcacagtacacagaagagtacaatcttagccagttcttaactaagctcaacgggtaatagcatagccaagaagccaagaatttgtgtacatatttaattcagctcgattcaggagaaaccaacaattttgacgttccaaacacataaaaaggttacatccactctttttttttgtctccattttgttttgtcgtctatcttttagattcctaaaagaagaaatgattttaaaattataagaggagaaaacgagaaaagagaagttgatgacatcggagtcgttagttttggcaatacgaccggtctaatgtttgtgaccgccgaagtagtttttgtagtggattctgaatcgtgtaaatacgcttttaaccagcttttcctcttctgtttcagctttttttagttagtttctgtttcaagtcttcttctactttttctgttaccttgttttgtcggtgttcaagtccaaaagcataaaacaggtaaaaagaaaaagcattacccttgagtaatcgacaaacctctctaaatcgacacaaattaagcccatcaaaattcttgaacaaatctgtttcaagtcttctactcctgtggtctaaccatgattggcaattgttttcacacgcttagaagattagtcaccattatcaaataataatcgaattaaaacttgctgaaaacttggataaccatcctagaaacatctctcgtcctcttacgagttacataacctatttttgttttgtttttaatttaacagaatgagaaaacatagcaacacctgaatcgacaaatctgactctatatacacaaaattcacaaccccacacacaacaacagtttttcacaaagtgagcctaaaaaggataaaatcagtcaacaacatcagagcagagaaaagatgagataagatttggatcaccaaatgtcatgagcaagtcaatatactgcatagcttcttgtggagtgagaccttctagtaggaaatcaaacgagttagaatgagtcccactcataacttctaagctttgattcatcaatttcttctgcttctctttccccatttctgcagcttccaccattggcaataaatctttctcttcctcttcaaaatgtgttttacacatcatctatgttcaaaaacaaaaacctcaatcattacaaaaacagacaaaagtgaagctttttgttattgttattttaactttacctgcaatgatttgaaacgagaagcaagactaaagagagcttctgaacaaatcccagaatccaaaactccaatagatttgatatcttctttgataccattcatcattggtaattctctcccatgttcttcatttgcacttttacacatccctacacacaaattcacagaaatcaaaatttcaacatttgacaacaataatcaaattcattccctaaacctaaacaattctctttaattacctcgatcaacagattcaagaacagggaacaagattctctcttccatttgagcatgttcgagcataagctcctgtaaatgagtataactctttgcaaatttcctaatctccatcttcggtgttcccacagacggatccaccgcttttttacctccacgcgccgccagatcctccgaccatctcaacatcctctccatatgccacaacatactcctatgctgaagccaaatcatcttcactatcaatggagtcgcttcgtcgaagccttccagattaaacttccaaatcatcaaacgcggctctgggaacttatcctcgatgtaacggagaagaacctctcgagaacctgatacagtctccgatccgacttgaatcgtcggtttttggtcttccgatggaacgaaacggagcggaactttcttgtggagaagagcgaaacggagatacgacgtcactagactgttaggtggtccgtataatctcactgttgcggtgaagctcaccgtcgatgtttctgttttcgcggtggggattcgttgggttggtggtgcggtggcggcggcggaaggaggaggaggtttgacgacgaggtcaaagggagagatctcagccgtggatttagttgagctggagaagcaggttcccatatttggtgaagaaaacgtgagaaacgaaatctagaatctcagagagagagagaagaagaagatgaagaagaagttggagtgaattgcaagaaattggagttggagaagattgagagattagaggcgcgtttgttgagaggagagaaaaaggtatcacgccattatcatattgccaaaagctttaggaactttgagagacttcagtatttttctttctcaccatttaagtgtttcccataattcaattcttaataatgaatatttttctttgttcctcaaaaaaaatattaaaggagatttctgactctttggaacctactttgctgtatcactggtcaagtcatagtcgtcatgagtctacacaattatttgtgtgatctaacaatctaaaacatgtttgattagcttcttaaaaaaaactacaatatgtagtactaattttagataaaaatacttccgacttttaatgttgaattgtgtactgtacactttatgagaatttgaggataagaggaagaaatcaaatgttttcttttatggttgtgattttttttgagtgttttgtttatgccaccgattttttctacaaaaagtggatgaagagatctctgtgtaattaattcaaagtggcatcttgtatatcaattatctatcaattttagaggattctctatagttattgcgagatacaccgcatatgtgtaatgtctttgttgaagaagatcttctctatatataaatccaaaataaaattcaatggtaattaggaaaccagttcttgtttatttcgaaatcaatggtaattaggattcggtttcttttggtatattttatagatctatcaagccatcgtagaaatcactcttggcctcggttaaaataaaaatatacatgtttcgggcaaccaaaaacctttaatgtattttgacaaaatggttttaagtaatacgcaactatatttttgctaatggtgacttgcggttcaactgcggataaagtgtggtacggttctaaacgaaaatatatacatatacacatatatatagatattttcgttactatttgaaccgtatcacactatgcggtttggtcaccatttggtgcaaccctttatggttaatgaacctcataatttttacttaacattagccatttctcctttttcatgaattgaaattcacttttcactttacctgaaagaatttcattaatgataggatatcttgtcatatacagtacatcaatattcaaagcatcgagatatggaagttttcaacagttataacttaaaactctttcttatgatcactctcttgtctcatcagggtccttacacacaactttttttttcttattgaacctatctctgatagtttatatattcaagtttgattgtcatctggagatttatcaattattggatagaattcctattactatcaactaatctactcgcaggcccgtgccagccattttgggatgccactagaaagttaatatgatcatttaagatttagctaaagtttggaaaactggaacaccaaaagagacattcaacatttactactatggagagtaaacgctctttactccaaaatcatctttcagcttattttgctttagttgtacatgaaacctataaaccatgcagatgtatggatctctaaatcgggatctctaaatcgaatttcatggattatgtggtatatttgaaaatacgtatgtattttatctttggttgcttatgtttgttatcaataaggtcccatgtttacacttgaatcattcctatattgaatatttaaaatccataacatgatttgctttttagaaaattgattggctataaattctcaccatcctcagtcatagtaaaaacgaagccaaccatatatgcttattcatatctccctttatatctgtagacaatagacagagaagttgatgtggggataattgaaaaggtacgaaatatccctttatgaaattatttcatatccgctttatcaaacgagaaacggtgtaaaaaaacaactagcagacattactttgttaccttttttgttcctcccatgtgatttgccctacttaacctcacctttacgcttcaccttttgctctttgcttcatcagccacagagtttaaaagccgtaacattctatttcgcttttgggtcatcattgtttgcttcttctttttttctctgtaaaaactttatacagtacctacaattttcttgttcttttttcttaatatcagtcgaagcctaaatgacataaccgcatacactacacacatgtatcttggagatcaccataaagaaaattgctgatcgcatagaatagaacagacacggcaacttgagaacaaaaacattttttttatatatatagcatcacagcatgtgggagatgatgatgatatgatgatatgttattataagttcttccatgtacaaacatgagcatgcaatttaagtgttaaaacagatacaaacgaagcgaaacatcatgatgagcatttgaaacctccacaagcaacaacccaaacgatgagaataaaagagaaaacagcaccagccaccatcagcttcatctgcagactctgtagccacatcttccttcttaactgccttccttgtctctggaagctatctgcctggaactgtaggttctcggttttgtcaaccagaagttcgatcttctctcctctgtccagaacctgttaaaataacatcaaagataatcatcaaaaaggctgcaaatcctctccgtttcattctcataatcaacatctattggcataagctagttcagtgaaaatgggacaaaccccatcttctattggagatgatagtgcgacaaattctgaagttactctggttgcctaaccttttacagcaccaaaaaactagattttgttgaaaattacttgcagttactttttataacattattgacctcaaacttaaggcaaatagaaacatagtccacagagcaaaagcgacagatgatatatcgtgacttggaacagcactatagcacaaccaactccttcctatgatgagaagcagggagttcatgctataattatcccatttagacttcctcagtactaaattttaacagaggcgtgtatgaaatcaagccggttaaaaggcagaacaggggtctggaaatctaattcaagctgcgtgcaacttcttagtttctatcagacttagatactaaagtccattctgtcacagttttaaaagttgacaaaggtctggaaagaaaacacagtaattcacaaacaatataattataccagatataggttaatgaaagaatggttgtgagaaaagcaattgatacatttatccagtaaaactaccatggaagtaaacctatttatttggtgtcaaatatctcttctagaaagtatttgttgttcagcatctttcctacagtacttttttgtaattgcaaaatcatgtggataaaaatgttgtcaccttaaaccaaaaaagtacaagatctgcgtgctactgttaattaaaatgtctaagctagttcatcttttcttataacgacaaaagcataccttctcaatgttgtccatcatgatccccttgacctcagttatttgggccttcaacttagaaagtttgctcatctcttctggatggctcatacaatactgcatatgctcctttagtatgggcctattagaggggaaagaaaagaatcagaacacagttgcaatgcgaaacaatgaagtgatatcagatagttacagctatagacagacccgaactccctgtcaagattgtatgcaacgctaaaccgatctccaaacaaatcatcatcttcgtcctcatccgcaagaggatgtcgctcatcattctttatactcgcttcataccgcttcttaaagtcttccttgacccgttcgagaaacacgaaaggaacacttcttccggtggactcatcagcaaccactagaaacactatacacgcaacaatcacaaagcatcaccaaatccgaagtaaattaaaaaagctttcaacttatcaacaagtagaaaaaggctaagaaagaaaactcaccaaagccattgtcaacaaggaaattgaaagtatgaccatcgcaagagtaagtatacttgctgctatttgtgggtagcttctgcagacattgaacagcaatggtgctaaagtttcctgaataaggagtatgctctgctagaacaactgttcctttagcaacaaagctatatatcaaacccttttgactcattattgtactcgtgaaacctttgaagaagaagtcaaccacaaccacaatcagatctggaatgcaaaaccaaatatggaatcataatccagaaatatatatatggaaaactatagatcactgtagaaatcagataaaaccctaaaacaccaagaggaggataacagtaaatcgcaaaatcgggagataaaatcactaatcgtatagaatcgcgatttataattgagaagaattacaccgaagcgcaacaattataaatcggaaaacgtgttcttatgctccgattaggttgaaaatcgacgcaattaaaagatcggtgctatttacttccggaagaaaagtatagagatatgatcggagaagacgaaattgaaggaggaatcaaacgacgcatagcagtagcagtagcagaagaaacaaaagcgagagaggaatgagtaccttgagacttagcttggtgatgaaggattaggctcaaattctcaggaatctggtaatatcagacgacgacgagtcacgactagttttagctttttaggcttttagcaggagatgatatgacataacttaatgctgattaattctttaatcaccaaatggtttggtttgattgtttccggtttcggttctcggtttatgaaagttagctattgaaatcggaaacccattctatttcgccttggtttgatactttgatttggatattaccggttctttattattttttcgggttagaattgaaatgaccgtaactgtgttcggtatggttcctttgtgatgggtaaattaatcatcagtcataaattctgaatttgttaaatttacagatcacacctgaaaactgatgaaaacgtacacgcaaacaaagttgattatctaaacgataatcaaatactttttccaatccaaaagataaaagataatgtgaatattgcaacaaaattagatgagccaaaatatgaaaaaagcagcaaagtttggagtaagtgacacaaactggaaacacaccagaaacaaagtgactaacactaaacttctttcaaaaagtattcccaaaccgctttcagacaatctttcagcatgtctgaaacacatttcctctccacatcttcctcctgaaattgtaaacataactattgtcacttgttgactatcactacaattaaaagaccatgtctaaacaaaaaatacctttagtagtatagtacttaatgcttttagtttgaaattcacttcacttgaggttcctccaactccagttctgaaatcatatcgatcagcctctcggatttgaagcctcatagtctggtttatgtacgtagtagttacagtatgccaaacaccacaaacaatgtatcgatccgcacaagaagatttcccaagtggccactttaacccacctttcacagttggatctaccaccgctgaatcagtcaattctttaagattcgtaatctcattctcctggatacaatcgaagaaccatgtttcacattttaatctacaccacttgctaatattcttcaactcattctcttggatactaaatatggattagacaaagtcaactcacagagagattggttaatgtcctttttgagtcaaccatcaacctcatgtcaagatcttgatcaaggcatgagacgtcaagatttaagtgcctcaaagcattaagctcagcctgaataaaaaccaaacaaaagcttcaatatgattcacttaaaatgtggtaagtaggggagatgaaaaggacttatcttatagaaattgagtcgtttattttgttggtccaccatacatttacatgaaatggttacatcaggacgagtgttgtctgagacctagaaaatcagaaaccaaaaccacaaaagaattaaaatgaaattacagacacaatcatgaatctctaacataagaaataacaaaaccaccttcacgtgatacaactctttggtttcttcaacacaaaatcccattttgtgtacagctctatacccaacattttcgacataagactttgggacatttgtacgaaacattttcttcaatttctccaaagtgcttttagttaacggaccatctcttagagttcctgatgaactaacactgcatcaatttgataagataacaatcggtaaacttgtttattcaacataaaaaagacttgattagcgagaaatgcgcaatccaactatagtttctaagttgtctagatagtagataaccgactcaactatagtgtccaagttgtcaacacagtttcaatccactacaaaccacctacggtaattacaatgctcttaaaccaacactaggctaatcactaaccctgccccaggtaaaacagagtttgtgtgtgtccctaaaaactgaaaatttgaggagaagtcaaaaaccttactcatggaaaacaacattaccaaaccgagcgatcagtctgagtttgacatcctctgatccaccataacctagcaacgtcttctttgccctatcaaatcccattataatgtcatcctccactttctctgtcacccataaccatggattttccagttttcccaaatcactcttcgctaagattaccaaagatttttcttctgcgtctttcctccactctgaagaaccgggcacaagttgaaagttgctatcctctggatccgaaccaacgagaaaccatctagaaatgtaaccgtttgcgtagattatctttgtattagtactcccgacgtttttattgtgttttttaagaagagaaggtggaacagaggatgctctcaatgcaacattttcaagtcgtttatgtggtggaacgtaagacatctctgaaacgaatatatgatactaggaaaattaaaagctgattccaaaaagataactcaagtttccgagcaacgaagtatgagaagaagaaacaaaagagtaccttttaattatatcagcttaggtcattcaaaagaagaacgacgatcatacgagaggaaactgaaaaggcgcagagcagtgaactgaagtggaagagacgagacggtttggtctttttatcactagaagtttagtcttggaaatgtgcataatatttaatttcatttcaattttcaaatcaaaaaataaaaccgataacgaaactcttgttatcatattatgagcgttgataatttagagaatctctgttcttttagaaaattgtatgaacattttgttaaataaataactatttttaaatgctaaacctcattgtttagtcctaaatgttaggaatcttagtattcatttttttttcctcttatgatatacacttccggtttagatttctaggacgttttaaatttaattattactgctaataaaaatagttatttatttttaaacaattaaataaaacaattgtatctctagagtaaaaaaagttttaaaaattttggtgaatgtttttatttggcaacccaacttaattcctgaaacgaatcacgagaattatttaacgtactacaaaaggtacatctaattttctaaaaccgaattagactatcgtcttggttgtttttggatgttgcatgtctatattatgataattattctgtaagcattacaattaaatcgtttctgtttttactaaaggagttttgactgttttaaacgactgtaaacactcgtgtgtctgcttaaatcatgtggaaagttaaatgataacagttagaacatccaactttacatatgctttgattagacattttctacgatatgtttcggattgacacgtgctaatcatatctgatcattttcccattttacatatgttctaattaggcattttcgacgatacattttagatcgataatgtgttaataatcatctgacattttttactttgtatgttctaattatgtatttatacgataaacattagatcgacacatgcaaaacattcgacaatttgttgaacactgaagacctaatttggtataatacagctcagcgaagatacgttacaactaatttggagcgtttatagaaaatataggcaaatagccaaatatgctaataaaaagatttagaactttaataggtaatttaacacattttataacacacaagcatatatatttaaaagggaaaaaactagtcaactttcatagaccatcattaccataataactcaattcaatcaaattttaatttttggctactatttttcttttctaaaaccaaaacatcatcatagtagattcttcaattttaaaatatagaattcaaattgttgaccagggaataaatagaattgcaaaaaaacaaattaagatattttacattccaacttttcccccaaaaaattagagaaaaaaatcaaattaaattcaataattccaaaacataaaacgtacaaaaaagttaatgataaaaaaacgtaaaaaaaaatacaaaaatacaaagaaaaaagaaagacagcgtggagagtaaagctattggtagcatggctgcaacagaaggccaagtgtttggtcttacaatttcatttttaactctttgtgttaattaacccaattagccctttcctccttcagggtttatttaacttgccctttctcgtttcctcctttttttcttaaaccactctgcttcctcttcctctgagaaatcaaatcactcacactccaaaaaaaaatctaaactttctcagagtttaatgaagaagcgcttaaccacttccacttgttcttcttctccatcttcctctgtttcttcttctactactacttcctctcctattcagtcggaggctccaaggcctaaacgagccaaaagggctaagaaatcttctccttctggtgataaatctcataacccgacaagccctgcttctacccgacgcagctctatctacagaggagtcactaggtttttatttttttggaaattaaatgattggttgttgagattggatttgggttttgtcttaaaactgcatttgtaagattgcatgttgttttgtgggattttgcagacatagatggactgggagattcgaggctcatctttgggacaaaagctcttggaattc

SEQ ID NO: 104 - DNA, 40766 bp, Arabidopsis thaliana
aagcttcaatatgattcacttaaaatgtggtaagtaggggagatgaaaaggacttatcttatagaaattgagtcgtttattttgttggtccaccatacatttacatgaaatggttacatcaggacgagtgttgtctgagacctagaaaatcagaaaccaaaaccacaaaagaattaaaatgaaattacagacacaatcatgaatctctaacataagaaataacaaaaccaccttcacgtgatacaactctttggtttcttcaacacaaaatcccattttgtgtacagctctatacccaacattttcgacataagactttgggacatttgtacgaaacattttcttcaatttctccaaagtgcttttagttaacggaccatctcttagagttcctgatgaactaacactgcatcaatttgataagataacaatcggtaaacttgtttattcaacataaaaaagacttgattagcgagaaatgcgcaatccaactatagtttctaagttgtctagatagtagataaccgactcaactatagtgtccaagttgtcaacacagtttcaatccactacaaaccacctacggtaattacaatgctcttaaaccaacactaggctaatcactaaccctgccccaggtaaaacagagtttgtgtgtgtccctaaaaactgaaaatttgaggagaagtcaaaaaccttactcatggaaaacaacattaccaaaccgagcgatcagtctgagtttgacatcctctgatccaccataacctagcaacgtcttctttgccctatcaaatcccattataatgtcatcctccactttctctgtcacccataaccatggattttccagttttcccaaatcactcttcgctaagattaccaaagatttttcttctgcgtctttcctccactctgaagaaccgggcacaagttgaaagttgctatcctctggatccgaaccaacgagaaaccatctagaaatgtaaccgtttgcgtagattatctttgtattagtactcccgacgtttttattgtgttttttaagaagagaaggtggaacagaggatgctctcaatgcaacattttcaagtcgtttatgtggtggaacgtaagacatctctgaaacgaatatatgatactaggaaaattaaaagctgattccaaaaagataactcaagtttccgagcaacgaagtatgagaagaagaaacaaaagagtaccttttaattatatcagcttaggtcattcaaaagaagaacgacgatcatacgagaggaaactgaaaaggcgcagagcagtgaactgaagtggaagagacgagacggtttggtctttttatcactagaagtttagtcttggaaatgtgcataatatttaatttcatttcaattttcaaatcaaaaaataaaaccgataacgaaactcttgttatcatattatgagcgttgataatttagagaatctctgttcttttagaaaattgtatgaacattttgttaaataaataactatttttaaatgctaaacctcattgtttagtcctaaatgttaggaatcttagtattcatttttttttcctcttatgatatacacttccggtttagatttctaggacgttttaaatttaattattactgctaataaaaatagttatttatttttaaacaattaaataaaacaattgtatctctagagtaaaaaaagttttaaaaattttggtgaatgtttttatttggcaacccaacttaattcctgaaacgaatcacgagaattatttaacgtactacaaaaggtacatctaattttctaaaaccgaattagactatcgtcttggttgtttttggatgttgcatgtctatattatgataattattctgtaagcattacaattaaatcgtttctgtttttactaaaggagttttgactgttttaaacgactgtaaacactcgtgtgtctgcttaaatcatgtggaaagttaaatgataacagttagaacatccaactttacatatgctttgattagacattttctacgatatgtttcggattgacacgtgctaatcatatctgatcattttcccattttacatatgttctaattaggcattttcgacgatacattttagatcgataatgtgttaataatcatctgacattttttactttgtatgttctaattatgtatttatacgataaacattagatcgacacatgcaaaacattcgacaatttgttgaacactgaagacctaatttggtataatacagctcagcgaagatacgttacaactaatttggagcgtttatagaaaatataggcaaatagccaaatatgctaataaaaagatttagaactttaataggtaatttaacacattttataacacacaagcatatatatttaaaagggaaaaaactagtcaactttcatagaccatcattaccataataactcaattcaatcaaattttaatttttggctactatttttcttttctaaaaccaaaacatcatcatagtagattcttcaattttaaaatatagaattcaaattgttgaccagggaataaatagaattgcaaaaaaacaaattaagatattttacattccaacttttcccccaaaaaattagagaaaaaaatcaaattaaattcaataattccaaaacataaaacgtacaaaaaagttaatgataaaaaaacgtaaaaaaaaatacaaaaatacaaagaaaaaagaaagacagcgtggagagtaaagctattggtagcatggctgcaacagaaggccaagtgtttggtcttacaatttcatttttaactctttgtgttaattaacccaattagccctttcctccttcagggtttatttaacttgccctttctcgtttcctcctttttttcttaaaccactctgcttcctcttcctctgagaaatcaaatcactcacactccaaaaaaaaatctaaactttctcagagtttaatgaagaagcgcttaaccacttccacttgttcttcttctccatcttcctctgtttcttcttctactactacttcctctcctattcagtcggaggctccaaggcctaaacgagccaaaagggctaagaaatcttctccttctggtgataaatctcataacccgacaagccctgcttctacccgacgcagctctatctacagaggagtcactaggtttttatttttttggaaattaaatgattggttgttgagattggatttgggttttgtcttaaaactgcatttgtaagattgcatgttgttttgtgggattttgcagacatagatggactgggagattcgaggctcatctttgggacaaaagctcttggaattcgattcagaacaagaaaggcaaacaaggtttcgtcttcttctttttttcttcgtaactcatgattttgtttgttttaataaagatctggactttaactgataaatttggtttctttgatctgttgtttgatctcaacttcgtcacaacttcaccagtttatctgggtaagctctaattctctgaaacaaaagatcaattgttttttactaaattgaaagagaaaaaaaaagagagagtggatttggtcagaagaatctcaactgctttcacgcgtaattgcaggagcatatgacagtgaagaagcagcagcacatacgtacgatctggctgctctcaagtactggggacccgacaccatcttgaattttccggtaaaccaaaaaacaaaaatcagattgttttgatatgcatgtttgtgattttggaatctggattataattaaaaaaaaaaatggggaaaatcaggcagagacgtacacaaaggaattggaagaaatgcagagagtgacaaaggaagaatatttggcttctctccgccgccagagcagtggtttctccagaggcgtctctaaatatcgcggcgtcgctaggttcctttttttctctctttctttttttaatttctttagatttattttttaaatttcggaatttactaccaaattgagaaatgatttttcctattttcggatatctgaataacagaattaattattaggaaaaaatctgatcatgaaaattttgcttttagaatattctctttttcttaaaaaaaatcataaattatgtttttttcagcactgctaaagtttatggattcaatagtttggtcattttattcttaaaaataggattatttttgttcataaaaacaggcatcaccacaacggaagatgggaggctcggatcggaagagtgtttgggaacaagtacttgtacctcggcacctatagtacgttatctcctttcccttttttcttctagtaatttttagaaaaaaatagatatgtactcttggttaatttaaaataattagcgtaattattgacttttttataacttaccgggcataacggatcctttttacctgttatgctttataatatataattttgtaagtataaaatagagtgtgataatgtttagactgttttttgttgttgtttataagagtgatttaagaatattaatttgtttagtgagacaattagaataatataatggggaagcagtggcagtggggtttgaattttacacacactgactcacgtgaggcgagagttttgacatcatgtccctttaattgatttttatcttttaatcaaatcaactttttttcttcttcttttttaattatctgatccctctgcataattaccttttaaattctgcattttttgtggatccgatactctgaatacaaaaattgagaactctgcagaagggaatattaacaacaactcttttactgaaaagtaatcccatttttttttattgtttttgctgactcttaccgggtccttagatttatttaaggacctcctaatcttcaacaaatctcaaatttttgaaaattagatttttttaaaaaagtaatacaaattgagatttgcaaaaatataggcattgttgttctataacaaagatactttatttataccaaaaaaaagaaaagagttgtcaagagcataattacaaaaaaaaaaattgaaataagtagtagttgtgaaattttgtatagaaaaataatgtaggttacaagtgtaaaggcgcgtgtagcgcgcgtaggtcacgtgataacactctcacttcataaaaggacaaaatagttcagagaggctttaggaccaaacccgaggtcgatctggtttgctcttgtttttttggtttattaaattggattaattagttagagttgagacttgctctgagtaggagtcacgagccctcacgtgcactgctcatctctctctatctctctaccatatctttcatctttgtcctccgaacaaaatctggtctaactttatcttcttttcttttaataattgtcttctctactttaccattatttttctctagattattctggtaccaaacttataacttaatagttgattagtgcttagagttgacactaggttggtgttttaattattgttaattaactcagtaatcgtacgttcgtgtattaattatatacacaaattgttgcgatgacttaaattaagtcacaagtttggactctttagtgtttagagcggcgcagtggaggagaaatggtctttgtacacgcctcacatctccacacaaatcgtgtaaccctagttgtccctacaaaaacacgtcaccaaattctattgattctttgtctttattaggtatcataaattctctaatttaaatatgaaacgacaaagaagaaactcttctttttaacacttgtttggtcttatttggttatagccacttaccaggtaatgtgaaagttaacaacaagttgcgttaactttcaaaacactgactttgtttgcattgtcttgatttagaagctttttagctaacacagttgtctatttattggttttacagatacgcaggaggaagctgctgcagcatatgacatggctgcgattgagtatcgaggcgcaaacgcggttactaatttcgacattagtaattacattgaccggttaaagaagaaaggtgttttcccgttccctgtgaaccaagctaaccatcaagagggtattcttgttgaagccaaacaagaagttgaaacgagagaagcgaaggaagagcctagagaagaagtgaaacaacagtacgtggaagaaccaccgcaagaagaagaagagaaggaagaagagaaagcagagcaacaagaagcagagattgtaggatattcagaagaagcagcagtggtcaattgctgcatagactcttcaaccataatggaaatggatcgttgtggggacaacaatgagctggcttggaacttctgtatgatggatacagggttttctccgtttttgactgatcagaatctcgcgaatgagaatcccatagagtatccggagctattcaatgagttagcatttgaggacaacatcgacttcatgttcgatgatgggaagcacgagtgcttgaacttggaaaatctggattgttgcgtggtgggaagagagagcccaccctcttcttcttcaccattgtcttgcttatctactgactctgcttcatcaacaacaacaacaacaacctcggtttcttgtaactatttggtctgagagagagagctttgccttctagtttgaatttctatttcttccgcttcttcttcttttttttcttttgttgggttctgcttagggtttgtatttcagtttcagggcttgttcgttggttctgaataatcaatgtctttgccccttttctaatgctccaagttcagataagaaataaaaactaaatgaaccgtaaaacacaaaggaggctaagatgtctatgaatttctctggcatatgtgcaataaggaagagcttcaaggaatcttgaactaagagaaggcttcaaaggctagacctcttcaagttcccctgtcttattattgaccggactatgaagtttctaggaaggttatataggcaaaagtttattcctaactcttaattcataattctgattgcgatgatttttggtttgctagatagtttagtaaaagagccttaccatccaaacttgtgatcaatattggtaaccgtgaacgtcttcattagggtgaatatttgaatatctttgttttcgggttacacataacaacccgaaaagttgttgcatttggctcggaatacatcttgtataaaaatttgtctttactttttagttttgtaaatcaatagtatgattggtagtctattcgttttgtggaaacaacttcaatttgtatttcatcagacaatatatatgcattcaagtagaaaatcaaatcgagtaaatttgtagcataattaagtagagtggtcaatataataatacgatacatgataaaagtcttgaaaacattccacacacaataagcctaagcactactgatcacacaatccatatttctttaggctttaaaatacataactaagaaacatgacagtttaaggttttagcaacaccatgccttatgttttaagtagttactaaataattagatagacaatgatggcaccagcaaaccttttagcctttaattattcaagaagatggaaggtaatgatgtcagaggcagagggtgcatgaaggccatggttggggtaatagtggtgatggttctggtggaaacgaagagcgtaagcacgtgacccttcgatttggtatccaagaactgagtcgtaatctcctccattgtctactagtccatagtgaggatcttcagctcttagttcctaattcaccaaaacatgttttaagccatattccacataactaaaaccaatattattaattcgaaatgacatgacatttgatatatgatttaactaggagatatttcgataagagaatcacaagaaaacataagagtgactgatcaatctacactacatttctagatatctttttaactggctccgtattccatgaatgtattatgcctaaaccaacatttgagaaaaacagaaagagatattaccagctcatgtatgagattcttttgtatgtcttgttgacttttgttctgcaattgtgtaaaccacaagagaaatgatgaagaaatattccctcccaaaaaaattatgaagatatatacccaagttattatgacatcactatatagtatacttggtattttctttatccattagcttaaacacacacacacacacacaaatataattgtccaagaaaagtgttatcaacagttttagtaagttgataaattcaattgacacaaaattgttgagacaaataaatatgataaaatggaaaagtgagtggacatagaagatgtgacctttttcttggtggtctcgatctgattcccaagagatttgaactgtacagtacaatacaattaacatatattatccaacagtaaacaaaatgtttctttttctaaaacatatatacaacaataaaattcattttttaataattcaattcaaaactgaagcttgggtatataggattaattgaaaccctaggtaagggaaaagtatgaagagaaccttgcgctcgcgaacgagtttgaaagtgttttccatttcatcctcaagacgacgcagctcctgaatgtcaagctcgtccaaacactcacctagcctctgcctacaattttaaaaatatgtatattttcgtactcattttttttagtaaaactcctcatctaagagaagagagagaaacaaatacttgatctgagtccggagatttctatttgtctccaacagtttcctcttggtttcttgcattcgctgcagcaaaacgcatcaagaatttaaccaaccagcgaaacacatatcaagaagaagaagaaagatctaagaaggaaaaaaacctcatattgagtggcccaaacatcgacatcagaaatagtttggtacagatctacgatctccttcgttctataaccaacaaaatcaccaaaaaagtagtggttaattataagaaaacaaagcaactcaattagcttaatttaagagtggtgtttagagagatggtgtacgtggtgttagggctgatatactcatgaagcttgttggagctagagaacatgataatcgaaaccctagcatcacacaaaaccgtgagctcatgtgctttcttgaataaaccatttcttctctttgaatacgtcacttgtctgtttgtctggttctctatcctcttgatctggatcttccctctcgccatattcttctctctttgtttaatctttttgttgaagagatttggtggagaggacaagagatataatgagaagaaagaagtgaaatagaaagagagagatggagttgaagaagtaaagggtccacttgagttactaaaaatggaaagtattgcctaatccatgaaaggtaagttcagaagttgatgaaaactaagtgataaattttccatttatgtaaactgatttttttaattacaagacactgtttaaatcaacggacatcgatggttgtataattacaagacactgcttaaatcaattgtcacttggtaaaagagggggaccaaagctaaaaacttggtttgcttttcgtcaatttattaacggagctccgttagcttctactttgtttttgtttagacggtgacaaacttaacggcgtttgtaaacgtcaaatcagtgcaggtggatttggttggctttttacacttaccctaaagtaaacaaaagtgtttaggtgtgaacaagtttttatattggtgttaaaagccaatattctacttttgtctgttaatttgggaaataagaagaaagagatatatatgtttggattaatcgtcacttccatctaactcaaatcttttatatgtttccccaaatgattacaataatttcccggatttgcctttaactaaagatccttggaaaatagaatattacccctagggtttaagaaggaatcacaagttaggagaaaagtctttgtttgtagataatgtttggtcctaactccaaacagtccatcaaatcagatatatgatgaaactcttttttctttttgcttcgaccagttagtgttgtttcaaaactaagttggccacagttactgttgttttgaaactaacatggattgatcttagttcatcatcaattttcaagcaatggaaatcagtgagtgagtcacgaaaatggaaacctatcctttatactgataggatatccaaagaacttgtgtatcaacttcacaagaacaatcattcttcgcttaaaacacaaattcagatacaagagacttgtattttcatttcaacgccttaaaacagggtcaactatgcatgatgcggaactaaagatgtattaaaagatctacaagacgtgttcctatggctaaggtacattacacaagagatgcatcattcatctacacaaacaacacgcactcttgatctggtctcagttcactttccctcttctcttcaggtactcttgcatgcaactttggtttgtttcaaatataaaaggcattccccgtatctgcgcgcacatatatcgggtttaagtacggacctagaagcgtaagtaatgatcataaaagagtatcccggatcaaacctcaactagacaatcggatttgaggattaaactctgtccaggatctacttccttctcatttactgagattgaatacttccccaggttttttatatgaaacgaaccgtcatcacccagccgtatgatcgcctgcattcagtaacccaaaaaggaaaaaaacatacacaacaaccattacagatcctgggctgctgcttctcatacaacttaaagacctaaaatacaaatagaagtatctactattgaccgacctgtcgtcgagatattttgctaccccgcttttctcttcccaaatcaatgtccacagcgaggtcttctgttgatctacccaccaaaacctatgttaagaaaaaagaaccccgatatcaacaagtgctactataattcttaagaagcttatcaaatcatacaaggaatattaaacgaataagataatattacctcaggcttcttgatatagtgttttgaatatctgccatataaaacagcgaatgcaccacgggaagcaatggctctttgcatatatgaatgagcagcctgctcaagtcttatgattgttcttttcatgtcttggctctgatacttggagactgcaagtgaaaacattttagggatttacaaacaagccttaaacctcttctaacatctcatacgctacccatagaaaaggtttcccacatcactgcagcatgtaataacttttaggagccaaatgccgaaatacattcctattcacatactaaaagctttcttttcccaaaaatgtagatagatagaaagaaacatgagttccactggacgagaagggacgctcaactaccttcgagatcaaaattatcttgatcatcaggttccaagtccatgtcaagtatctgaaataaaaaagagtgttatggattaggtgtttacgtgtcatggaaccatagcacaagaataaagatggaagtcaagagttaccatagcctcaatgtcagaataattgggtaagtcctcatcactctcacaaacatgcgcttctgcttctgcttctgcttctgcacgggtgatctccagctcagggactgtaatctctatcaagccatcatcagtatctttagcatgtggcgattcattaacaggtggtacaacatttttctctttacaattttcactatccttctctgggtggttgccatggccatcagatccgacaaagagtgttccagtagcagtttctttctttccatcttttgcaccggtaccagtagaaagtagagtattagagcaagcctgtgcagaggaagaaccaccaggagctacagtattctttaactcagtactagtcgatgccctgaatttgctacctttacttggttggcccatctctggctttccttgagtagacccctgtaaacgtcctggttttttcttttgagcctggagtgaatatccctcacttttttccttactggcggagacgtctcttacacatgtagttattggactattggtatccttaaagttccgccgggctaaagaagaaactgacatcggacgggagttgttggacaggaaaatgtcatcattacacggaatatcaggatcctcttcgtttaataaacagcagattacacccccaacaatctcaggatgaggatctaaagcgattgtaccatctagctcaagcatcacatgatcatccagggttgcctctcctggatgagttggtgcaatggaaggttcttgctcggtggggttaggaaaagcctcgcggtttgtatcatttgtagagttcaccaacagtgagctaagaccatcataatatgacttgtcaacttctttgccatctacttccatgaacggttccatgtcttcttcgaaaagagaagttgaaagctgtgccaggaaatcagtgctagccattgtgttttttgcctcgtgagcagtattctctagtttctgctcggaatcttgatgaaccacatcacatactgatagacctgcgtgttcagtgaatgtgagattttctccttctacgtaaggaatgtctccctgtaaattatcttctggcagaacatgagttgtcacgcaaccaccttcagccaagatttctggaaacgcgttgtggataatatccatgtgagagtcctcaagaccaagatgtgttgcatcaccattatccatgaaatggctatcatttggtggaacgaggaaacctagatccaaggaattgaatggctcagtcctaaatttcttccgcaaggaatgataagtacttctgagcctttcagcattcctcttcctagatgaacttttgttttcttttgaatatccagttctaccaaacttagtaggaaaattagggttagtacgttcaagctcagccatccgaaaagccgcctctacagaaactactggatcataaagcagtgcatgccatcgatcttgcaattctctaatagaaaatcttctagaaaactgcacagcacctttagcaagcgattccaaagaagcaccagcctgcaaataaattaaggattctggttcacttaattgcaagattaccagacaagctgaaagaagaaacacgcaatacatacatacagaagcactaatttagtagagaaactttttggctagcctagcttgatatataaaatgctatatgagagaagcaatgaacataattatctatcttgtggtgattgatgagccatctgtaaaaagacaaaaggatattttttcaatcatattatgttctcataactgaacagaaaaccaaatttaagaaaaaatatttgacagtcttttccccgtggagagaagcatgatacatacagatcatcagtgatcacacagcaatatattatgttcctcgcgaaatggtataatttgttctagagcaacaattataccttgccacatcaagattgtgtaacttgtttcccataatactatactataccgcatataacactggcttaagatgttaacaggatcaaacaaaaagctgacatggttattcaactaaattttgatatctgcaaccaaccttttgtcccgaaaattcaagttatcacaagacatgaaaaggaaaaaaatgcaaccaaaacaatattaatagatgatagaatcaactagataggcatctcttttaggaaagaaaattactgataataacctgcctcaaaggatatgtcgtactctccaatcccctcaaaatcaactatagatacaagcaactatgaagaagaaagcctagaaacatcatgagcgacagaactgatagtcattaatgttccaactagacaactacttcaatttaagcaaaattgatacagctctgcaaacaagcatggtagaataagaaaactacatgatcattgaactacataaagcgcgtgaaaggacaggaaattgagacaaatattgagatcaaacccatggctcaatccaacataatccatttccggtagtaaaataatgaaaactgaaatgtaaccaaactcaatgaaatgggagctcacctcgacagcattctttagcagcaggtcgtcttcgggtatccacggaacaacttgagcaagagcccccatgttcactgcacaaccagacctttacttctctcaggaaagcgtaacgtagaaggggtctaagagatggtgacagaacacaaaacctaattaaacgaaatcaaaatcagacagatgtaggcaacaatatcatcagaagtgattcaaatttggttttctctacggtgaacaacactaacaaagacgacgctattacttggtctagcactacttgaaatggaattaatgggtttctctttctcaccgttaagctcttctagtaatctgaagcattcttctaggtttcgttttgcaatagggtttaagaacgtaagagaaacagaaaatgtttaagaaaaggagttacaataccttgaatcagcaaagaaggatgttttgtcaatctcgggaacaacaagagtgaggttcaatagcctagcaacagtaaccatgtcacaaaactggaacaacaagtatcaggatttggataaattattgaaattagacaaagatcgaaaaaaaaatagttaattaagaaagtgacgaaccacgattcgcagttgatttagtcagccattacaggatacaagtagaatttcattgctttggttatgtactgtaggtaaaaaatcaatactctcgttaaattctcaagctccaaagaagacgcacatacaattttttcgaaattctcacaagttgatatcacaatttatagatagagaatttagaaaactcaagacgaaagtaactaacttgagggaagaagaggaggaggaggaggcggcaattcactggctcgaattgaagagataaaatctaaaaaatctgaaaccctaatttatatctgactgtctccgtcgtccggaggcgagagtgtgtaaagaagaagataaagcacgtttgagaatggaacgacaccgttttggatatatgtgatttttttactttgctcttcttttaactcctttttctgaaactaaacttcaaatgcttatttcccggaaaaacagcctctttcaacacatttcgtttgttgttgtaatttatactcttttagatgatagatattagttcatattttttaaatgtacttctaaactaatattagtaggattaataaaatttgaactttaaatattttttatatattttataaatcctcagataatcaataatcatttctcgactttcatctttttctcaaattctcgacaatggtttctttatcctcaaaaatctgatctgtcgtcgtactattcttgttcagttcaactcaatctatgccggaaaagtgcacttatcgctttacgccagaaatttcatattggaagaaaacgctgatcttcaacgtaaaatcggcgaagctggcggctacttggcgatgcctccagatttcaactataaaccgcgaagagaggtatatagttgacttaatttcaatggattttaggttactcgtgtgaaatctttgaagaactaattaagatggataagaggcgagagttgatagtaatctttgactttaatttccgtatcttttaagaattgattaggtttttaggttttttaggcttggttactcaagattttgcatgattgcttgaatcacgattgattagaggcaagaatttttgtgaattgataaaatcagtacattgtttcatagcagttgatgtgaagtacattttttggcggaaaaaatcattttttcattttgttgatttaagtattttcaaatagaagcaaaatagtcattaataattaaaagataatatcaataaaaatgattacatgggaggatagtactaaaaaaacatatttttggaaaaacattcttaacaatttctctatatctaatacgtaaaaacatagttttacatacgaagttaaagatttagttacgtaattatatgaacagttaaaagacgtgaacatattaaagaaaaaaatactgaaaaaagctttacaaatagaacgaagttgacctaattttgttgattatgtagatttattttcgtaaaagtgacctaattttgttgattcgtgcgttggagttagtatatctttgtcgtttgcatagtatcatcggctttagggattgactatgtttatgtttttatttttgtaagagtagttacaagaaaaacttcattcaacaaaacaacaaagacaaatttttgttgtcgcaatttatactctttgtagctgattgagtttgcaaatacttgcattttcctttcacatcatctctcaatctctgttgggttctttctcattttgcactgaaaagaaatagaaagcagttcacagctgtagccgcttaagatatcttaatttttaaatttcacaagtgcatagagtacaatcatgcttaacaatttaacattgcaagattagtgcattgaaagttgaaaaccatcacaattcacaacatacagacaactctgtttctttgtcccttgagcgcaaatacaacatttttgctttctttattcagcaaaatgccacagacgagaacttaggtataatttctatatacgtacttaagcctgcatcggtttagagtgcagtttcagcatcggtttctacttgcttcttaaggaactccagtacagagagccgctgcatgcatgttaaaattacatttgtcagataaagttttactgacattcagcagctttggataagatacaaataaaaagggagtcgtgcaagaatcttacccgttgctcgagagcagaatcttcagagtccagtttcaaagattccagcagtctcatgccttccttgaacccatctgtcgctgcaacttcattttgtagagtcctgtctatatccgcaactttggctaaggaaacagccacatccagaatctacataaaaaatgtagaaataacaaaagaaatcaatttctacttccggacagacctttgcttactatatttgagttccaatttctctaggcaagaaatcaagtataaaataagaaaacaaagagaagatttccaaccaacagaataacccaattacaatgcacgtaaatctaattatatgtatccaaaagagagtaactttatcgcagagaattaaatgacacctcatccaagtatgtatactgcaacgacaacacgtcagttacctaaacctcagttcaacccaggcaacaaaatagcaattgacttgaataaaatctaggaaactatttagagaatttctctgaacattcatggtaaagtaacaaataagtaaaatgaaaagagtgaaccaagaaacccgcttgaacacattgagaacaagtatactattttcactttacatcgtatttcagatcctttgatccactagcaccttaagttaatctctatatcttttaatgcatttgaattcattttgcctggacccaaatgaacaccaagatgtaacaatcacataaataaacgctttctgcctagagagtgagagattacgatctacaaaagagccttcacgaatgctacaataagtcaataacttagctaacaacagatatttttctgcgagaccttgaaatgtatatggcgactaagagtagccagttcagctaaccaaacattgggacaaaacaaagaagagcaaaaacagaaaactgtatgagggcacacttacttgtgaaggagcatttgggtggtgcttcattgcatcacgtctgacatttaaagctctatcataatacgaccttgcagcttgtagatcttcgtcataatattttagatctcctattttattgagtgagacagaaagtgtatgtgtaatctgcaagttaagttaaaattgtaagcaaaaaggtaaaaagttttcaacatcaaaatttaacaagaaccaatgtgctataacctccaaatcattcaacggcagtttcataaggaattcaacactctcttcaaaatgcttgactgcagagcttgagtctcccatcgctcggctgcaacaacaacaaaaaataatttaaccatcaaacttaagtcccggaaaaagaaaaaattcaacacaccaaacagaagatcaaacattttggccaaaataacacagttcaggaggagaaaatgattatgtataaagtaggtttttcgaaccaagcatgtactgttgcttctcctttccatttattctgaacgaggtgattgaaccacagagaaagatgtatgcaaatgataagaggatacagaaaaatctgaatatatgaatatatttccagtcaattgatgtagacagggtccatctagaaaaccagaatctagttcaaacgagaaagaaattattttagtatttcccaaagtgccatgcgcactctaagcaagatgaaagcaacaaccagtcgacttgagaaactatcaattgaggaaactgccaaggaagggccacatacttgagaaactccaaattaaaaaaaatcaatttgaacaacaaagtggctcaagcgggatcataaaagaccacattggtgaccacattcgaaagcaccgttgttttcataatcttaattgttcacagaaactcgagaatggatacatcttagaaataaacaacttgggataaaaaagaagacaatatcatacctacagtcaccaagcatgccaaggactgcaccaagctgtgaacacaactctggtgtattgccctccctccctagttgatcccgaatgtcctcggtacacattgccaaccttgatttagcactttcataattttgggcactaaatgcctgcgcatacaagttgaattagaacaagatctcacagcgggacatcataacaaatgtaagtggtgcaaaagagaataatcccatcggttaggtcaacaaaatttagagacagaactcaccctcatagcttgttgcaccaagaaagaacctctttccatggaaacgtcagcgtaaatcacttttttgttatcattttcgacctcttctttttctgttccattgacgacagatctcttaattctagcatggccttcaataaattgatcaaccatcttctgaaggttttcatcaacttcaatactttcaatgtcagcaccgcatagagggcagtccttaaaccgtgttaagcatactctgcattcaagaaaccacaaagtataagaaaagtagacccaatcatgagccaaaaaagaaataagcggccgagcaactatggcttacttgcagaacacatgtgtgcaaggcacacatctactgctctcatatagaagtgcttgacataacatacagctaaaaggcccaagcttgaatgtttgagagtcatagccaaaagggcacttggcaggtaccgttgcagaatcagtagagtccttattcaagtttccttcttgttcaggacatcctttactcccattttcgtcaggacgagcagatttagaaaaagggcaaccagaagccgtcgtttccccttgctttcgagcagaggcatcgtcgggacgagcagctttagaaaaaggacaaccagaagcggtaatttcgccttgttttcgagtcgacccatcgtcaggacgagcagctttcgagaacgggcaaacagaagtcgtcgtcattcgtgaaggtagcaacaaccctacaacacctcaaaaggaaaattcaaaacctaaattactaaaattgcttcctcaagatgaaattcgaaattgattctctagctaaactatcaacagctggaaatcgaacatagaagaagctaattcagaagtagctcaacagagagagatggaaaaaacctgaattggattggattgagattagatttggaaatgtctctttcgctgcttctctgcaatcaatcaatgatcgattgatagctctctctcttcttttttctgtttccgataagtttttttttttttttttttgtgcgttggaattggatggtgttttgttttctctcagtcaaacgaaaaatagatattactaaatgggcctgcggtttttgtagcctatttaagaatttgggtcactagtcaatttaagaaaaccgttgttctggattataaactggttggatttttaatattaatcagcttttttttttttttcactgaaggtttagttttattaaaatccacatcacaatggttacaacccattaatggcccaaatggctacatcacttaaagataaaattttgctcaatacacgtgtcaaacacaaagatacgtagatgaaacgtgttgcaagaaaagcttggaaactttccgtcatccttcgccgttaattactccgactattgtaaacacaatcgacgccggaaaaagtttaagcatcgttttttgttgttgcttgtcaccggagaatgttgaaacagctacaggcaatcttaatatgctggaaacaagtcttctttcattacattgaacataattaccgatgaagatttgttgtaaccaaagatctgaagaaccagtttgagaacatccaagagaaaaagcagcaaatccacccgatctggtcggattagatatccgcataacctcactggaaaccaccggaaacataaaacaaaacaaaactcaaggagctagttggagaccaccgttgaacgagaaattgttaggttggcaccaccaaacatagatcagagagatttttaaaagataaactaaagaggactaaaagaaatcggcataaaaccgattcacggcagcgattcacggcagatgaaaataccaagccagccaaaaccgctaatgggagccggatttactggacgaaagccgaccatcgccgcatactaagccggtggatgtcgggctgaagccaattgaaccaattggacggccttatcggaaaattgtaacagacggtttttgatactactaatattaatcagctaacataagtaaacaatttttaatattcaaaaaaaaaaaaaaaaaaaaaaaaaatatatcctcttccttctctcttaaaaacaaaagcaccgcttcaattccgccggcgttgtgagccaccacggtcatgacgtcggtttggctttttggtttatgttcagttatgtctctttaagttgtggttaaggagatttctgggttggtttcgatttcgtttcctcctcaatttctcttattagatctatagtttcgattggtgattttgcaaattagcgtggttttcttctctgactaaatactccctggcctaatcacgatcgctctatgccactcactgtcggtgttgtggtgattcgggttgggtgacctaattttgggtttcctcacacagcttcaacaatacggatctagggcgaaatccgcccagattttgggttctttctaccggttcaagtcgcatagtcgatatctccggccacggcgttctcgacggtctctgcatgtttagctgagtttccaccgtctgccatccaaagtatcccaaggtttttcttctgaagatttttaattatcaagtaaggcaagaagatcaaattttcttaaagtgggtgtctcaatctccgacgaaatctccgatgccagttaattttcgatcttggtttatttggttaaagagagaactatgtttatgtgtaaaatcatcaatcatgttttattttgtctttctacgtcgtttccccatgtcggggcttagtgtcggggtttcattcctcgccggcttgtgtaccggaggattatatcctgccggctttgtcgtcccgtaattcactcgggtttatgtatctgatatggtttgtgctgataataaaattagctttgtgaaaaaaaaaaaaaagtaaacaatcaatcctttaaccgtatccggtcggatattttctaagaaatggtttagtcaccaaaatgtcataaccagttgaacccattcaagttctgtagtttacatatatatatggatactatctgattgatataagattatataacttaggtgttttagaaattcaatttcttcttatcataagagagtatgaagcattacaacatgcaagaggttcaaatcgacatcttaatccgttcaattccaatcaaatcataaactttgaacttgtcctctggactacgaaaggttgactgcttcacgggtaaaacagtgaacccatcaggatcagtacatgtctcaagaccacactcatggcataaagattcaacatccaactcctgaaatatacaaacttgacttatgacatttcaagtttaccaacaatacgaaaatagaaaaaaaagacagggaaatatttagtcataggggtattatcaccttcatcttcaggttctgagataaccgcaagagaggatagggttgaagcttgtagcaaacattgtttatgtattggacagccactaatcgcatcttttaccatgaaaacattaagcaaatgatcaacataattgaacaatttactgcaaatatcattccatgtatagccactttatacacacccatatatttgaacaatttactgcaaatatcattccatgtaactatataattgctttaccataccggtaatattttctagtacaaacttattctatatcatctttctcatgtttattttcatttcatattgcattagccgctaccaattaaagtcccacaaagactatccctgagagctaggacataactacatatttatatccatgcaagctcacctctctaatatgatgttcacttatgcaatactgcaagtatgtcgcctcagaagctgttctacttaagaagttcttgtaattgcccatccgatataatctggaagaaaaaattaagagaaaagacaggtatcattatacttcaattcatatttcctaaatttgttcaaattaaataactcatacgcaaatgattgaacagcataagactaccttaaaaggtttcgtacaaaacatatttccttggattttaccaaagcaaaagtcaacttgcgaaaccataaagacagcggttccccctgcagatcataatctcaacgatttctatcaatggcaaaaagaaggtgacatgataacaaattaataaggagaaagaaaccagaaaacaaccatcactccactactaggattgagatgaagcagcacatagagtgagcggaactcggcttcattttcgtagatatagtccggttttctatttgcatcatatatattatacaaagaggtaagagtttttgctagctgctccatgttcaagtgatgcattgagctaatacttgtaccactacaactttgaagcctctcgtgagatatgacatgaaattttacctgttacagaagccattcgggagtcaacaataataacatcaacggaactctatagaaaataaaacaaactgatgattaccaatcagaagaggatgatcaatcagagtggtatatatttctatgaaaattacaaaagaagaaaaatgatcctatttgagcatcctgattaagattacgactatgtaaactacaatcaacacattaagtcaaaatatcttaaacttacaaatattcttttggtaatagcagagggttaaacacacaaacgactgtcaacaaaacccaaggaaagcaattctaaagacaaaatagacatgctcagtgtaattcatttaccgaaccaggaaagagaaaagagttagaaaaaagtcaaaccataccatttcctcataaaggtagatcactctctcattggccaaattctggatgctaagatcttgtctaatagaccttgtcctatcgaaaataaaatcatgaaccacttcaaacgggtgctccttggagtcgagcaaacttagaaggtatctcagggtttcttctaaaactgggagcggtcttacatccgatgcctgaacatccgccgctgaaagggttctgcaaaactagcaagaacacagaaagagagtataaatgccgttggtattggaaaaaaatgaacctcattgcatagcagctggtatctcccaataagtagtacaaactattcatcttgaccaataagttatggattctaatttgcatagatgaagaatttcaacatcaaatttctttcaataacaagttctctcgaagaatagatacgacatgtcaaatatagaaagctgaaggtgaaagtttcccacattagcaccagagacatgaaaactcaaagctgtacaatgtgaaccgcacctttttgacagctatctctgtggatgattttgaggggtttccataaagcctctcaaacactgcaagatcacgcaggcgttctcttgtgactctttccctctctattgataccaaaaacaacatattagatgaagctgtacacactctttttggtacttcaagtgtaattttttacctaaacccctagcaaaagataattctttgttctgaactgccgatgcacggaaggatcatgaattgatgaagggaaagtacctaattgacctaagaactagatcaaatccaattcaggtgcaggatagggttgaattttagcggaatctcaggtcaattggtaatttatctgcagctaacgtagttcgatgattacctgggcacatagaagaacaagttcctacaatcaatgaaacgtcagcaggatcttcgtctttatgttttgattcgtctttttcattgtttcgtttgtgcggtgcatcggatcttctctgaaaggattcattaactccgccgccggatccagtcctcgggttatcagagaactggcggttcccataagtattcgaaaccctagaagaagaagaagaagagccacgattacgacgattcatggcttagagggaacgagatcttcttccctcccaagtcccaaaccagactctgaagaaacgaaccaatcaaagctgttaccgaactattatttggaataaaccggaagagaaccaaatccggtacagtactctcagcgaattaaatctggcggcaaccgggtcaatttaatttacaccggttctgacttgtacacaaatttgcatttctacaaatgcagcattcaaaattcaactcaagtaagaatctagaacatttcacatttccctacactttgtaatttacatatatagttttggaaaatttgattttaagttttgttttgtttttctttccggttttgcagattttctttttaaatcgataccaaatcaaacctttcgtatacggtttggtcttttttttttgggaagaatatatggtttagtcatttgtgcaattacgattcggttctgttttgtttttttacaaacaatagtctagttagatatatttgaaggaaatcaattttgattttgtcatttgagcatttcatttttggtgttattctattttttcccacccctatacaggcaagcttaggccggttggtgggtctagtagtcacggccactctctagacagcagagaacaatgtgtccaccactacaaatttaggtttcttttcatcaactatccctaacaagaatctaactgctaacattcaaaacacatagactagaaccactaatcatactatcatagtgcaatttcccatccaaaaaaaactccatattagaaatgcaaagagaaaaagctggttcatctccactaatactagacagttgtctcgcattcttttgctaagacttattttctctttcactacaatctctaacacgaccaaactgatcgaaccgaactatctaccaagcattctctgtaaatctctacctgaagagttaaaacacttaaacacacacaaatttgagacagtattagcatctctttgactaaagattgatgatattcatatggcaaaagcatacatttgctggtagaaatgtggaaatcgccatctaccccaggaaacaattattggtctctctctgagaaattttgacaaaacaacacttggtatgtacacacaacatcttgagtctccaatataaaaagcagaactcaatttcttccgatccttaatgaagaatcaacacctttgttctgtccagaagaagctgcagcagcaaagattctagcaatctctagctgagtattcgccattatctccgtccgtttcaaatccaattctcctctcttagcttcagcttcagctctcattctctctatctctttcatcgtctccattcttgctctctctgatctcatcaccacctccgctaaccaccgtatacttccggcgatctcttccttctcttctttatatcttctcttcactttcttccctctcaccttcgttttaaccacaggcgtactactgtctgtatccatctccgcatctttttccggtttgttctccggcttgaatccgtcttcctacacacaaaataacttcattagaaaatctcccaaatttggttagtttaggtgatcagaccttaggaatcttgccgacgccgttggatccgtaagaaatctgcggcggatgagccaccgcaggcaacggcggctcaagtaagagcagaggaacagagcaattcagaggcagaacagcttgaggctgaggctgaggctgagttccacgtaggagatgatcaagacgaggataaagaggccaagaggagccatcagcagtagcggactcagaacggtaccgtttcttcatggactcgatcttgttcttgcactgagtctgagtctttggtgacttggtgtgagtggcgcgtgaggacacgtgtttagccacgtcttcccagtcttgtcccttaagcttggctctgtttctgagaacccattttgactcataagcttcgagtaaagtcgaaacagctccttcgctccattcatcacgttttaacctatctacaacgacggaggaagcagatggcttcttaagcgattcgtcgtggttgagagatttgagattttcttggttagattctccgttctccatatattttttcttcaggtgactaaaaacagagacaaggactcaagagtgtgatgaaaggagaaagaaagagaagattttagcaagtcttttgataaagatgggaaccttttgagagagtgaatggagttaaacatatgagaactgtgtaagaatacgctgctgctctcaaaactaaccaatgagtttgggtacacgcgtttctcgcatgttcaatggtcgtgcctcgtgacttaaagctaatgaaattatgtttttcacttatattgttactgtcattttagtctttgttccaatttatggtttgtataaagattacaaatacaaacagagaaacgcataattgcaccggctttatacttaccttcacaaaagttagtggagcaacccgtcacacacacatactatagaggagaataaagagaaaaatgtgagaaagtgggttaccattgaaaaatagggtttcttttcttttatttgtcaacttgaaaaaaggttttacttttgattttattttttcacaataatgatttcaaaaatcttctgatgcaaatgcttttattcatttagctataaaagcctttttgtatgctttttttctctttttaggtgtatggtggagtgagtctggctgttagcgttgatgtcaagccaaaccgcaaaatccatttggcaaagatgggaatgaacctaatggaagtggggtttacacttgtcactctctcacccattctatgttccactctttttcttctctcatgtttgcgcaaagatactaattcggggttgttcctttttcacttattgaaagtgtatatctttcaaaacattcagaaattttgtgggttagtgttcactaaaatctttggttaattatcaagtcatccaaatattacaagtaccaaatattaggacaagtctttaattttcacaccttttttcttacctatatgagagaagttttgttgtaagagtgaatgtgtttcctcgttagtggagtatgatgaactatgcaacttcaaggcagcacatcggacattttggggtctacaagattatcatcgtagatttttaacgcgccatttagaacttctcagtctcatttgggtgatgaaaatgccttccaaggcataatcattttttgttgacattttggtactttctcatgaagttgatgcatatgattatacttggaagttggaacatatatatatttaaaataataaaggtcctctgttccaggcttattgcatccgcaaattcatgagtacaatcctttttgaacagagaacatcgaaagaaaatcatacgaaagattttacaatcgtttgagaattaacaaaaatcattaacttatatagtttccaaaattcaaaagttcaaaacgcattacgaaatcgaccgaaaacaaaaatacaaatcgataaaacttaggtgcaagtttcacgggaaattccgagcctggaatttggaacgtcgatgagaactcggtggttctgttgctgcatactagcgatgacgttaaggacagagttaacgttgaccggagctgcagccatggcgaggcagctgaggttacctgcggagctgtggatgagaaggttgtctggaggcagagtcacgttcattccggcgaacataaacgtcaccgacgggaacacgacggagccggagtagcatgtgtcgaaacctcctagtgaagttgcgtttgcgttcttaacacgtctcctgaactcgtttctcaccgccacgtaagctggttcgactagccttgtgtagaccgtccctgcgtacattcaaaagtgttttgtaattaaaaatcaaatttcttttctaaaatataatttttatatgaaaatttggattggccatttttgttttgattgtaaaatcatttttagtccagaaatatcacgtgttacgtgtgagagagcagagcaattaggttacttccatcgcacgacttttcagttctcaagcgaaaaataaaaaatattaaggagggttgagaagtccatacccgagtcaaagatggtgccggctccggtggccggatcaaaggcgagtgcacttgtaggaatatccacaattttgtttccgacacgaatcccaaccaagttaacatagtaaagcgatgatcttctagggttctttaacaatggagtggtcttgatccggatcggttggttcttaggtcccaatcttagtgatccggagaaattgctggacttactattaggcaagcaatacgagaatgtagactgataaagattttgtgactgtgagattaaagacaatggaccacgacctaagcccatgagtccttgcgctggcaacgatgttccactagctttgttgatgcacccaaaggtgtagtttgggatgacgtcactggccaatgttagtgtgtcttgtgtcagatatgcttcgatggttgaaccaccgtaggtcatgttgaaaccacatgatttgcttactgtgcaacttggatttggagcctgcaataaaaaaaactctttattgattaatatttagaattttttttgttctttgagtttaacaacgtatttccataaagaattgttttatccatcttggatctggttattaaattgcgctactaacgatgtgttacgttatttaattgcagttgtaagtggcgtttttgtattataggcaaaacctaactagcatgacgacaaagtatatatatagatcaaagttcaaacagtaaaatatgctctactagttggattgtttataaatttcttgtataaataataatatacccgtgacttagactcatggtaccaaaaggtccaaaacccgtgactagacttctcgatcatggtgtaataacacgccaaaaacgaagttcacattcacatcttttgtgtagatggatccaaaaattgacgtagaggcattcacattacgcctgacattcggttcgtatttcggttttggttttaaatttcttgttttgttaaaaataatcaagtccaaatactaaccattttttttctttcgatttgaaacatttatgtatgttctgattagatcttgttttgaacaaagtaaaaatgcgaattatttgttagtataatttaaatgtattttttgtatatcgattttcccggtttattcagtacaaaagtatcgttaagtatgaatgtatgatatgattcaaaaaaattacgttgagtatagttttcatttttcaagtccatccagagaatgcatgcacatatctaatttatacggagggtataactataaagcaatatttagttacctgtttacactgaggagcttcgcattgaagagtacgagaggagcttgacttggaagggtcaaagagaacagaggaagaacagccaacgcagccagaacaaggaatccaagcagcgtcattgctagtgtcaagagccacgagcatgggctgagccggtgtcccgatgttagccctcacgatgtaagtcgggctctgaacgatggcccgaccagaggcgattggaactgatgatttcctaacgccagcgaggcttgacaagtataggaaacgagccttatcttgaagaagtgtatctgcccatgaaacagaagttttgaatggagaacatagactgttaatgtggaacactcttagatctgaggaatggctcttttcattgcagtttatggattcagatttcaagattaagagagagattaacaaaatcaagagatgggatctcattgtttaagaccttgattttgtctttgtggtttctagtgtttgtagagtgaatgtgtgagtgtgtgtttatatagtgagtgatatacgatgagtgtgtagaaagtaataagaatataaaaatgaagagtggggttttgtatatcgtagagagaacagtctgtattccatctcctattttttcgttgtttctatctgttttttgggtccacactaatattggctctcttctctatcgacatgcgcgttgctctccatccacaaaaactcattacccaaggtgttgtaatttttagactcattatcgaatggtaatcaagtcaaactggaagtctagctgattaatcggtatattgactcttagcaaaaaaaaaaaaaaatcggtatattgataaaaccgattctcattctaacaaaatagttacagttttgataaatatccaatttatacaacgataagggaaatagcagaggaacgtgtggagtggtattgtttaagagatccgagaaactgagttgaattttttttttctcaaagagaaagatcaaaggtttcacgtgaggagtagaaagtggaagaccgacataaatgcattatgtattgttgcatattatggaatgtatcaaaactacccaatactcattaccatgtggtgggttatatctcacattggcctcttctccactatgtagtgctgtccatcaattattaaaaaaattaatggtgtaaagtatcttcattgttgtttgtttcttaagagttgaatgtgatatgtcaatatcctctatactaaaatatttgatataatttgatagagttttcatgttgtgtggattgaaccaaagaaaattttgacccttgtatgtagttgtaagtagctttgcttgttcttagtctccacttagtcactcgttttgtaagaaaaaaagtggttgcagcgaaaatataacaaatgtaaaatttaataaagttacacgatttaacaaatgtaagccaaaaatgaatatctcgtcggaaatttactcaaaagttacacgtcttaagcttacaaactcactttatttttccgatcaacattcccttaaaaaacaacattgttttactttcttcttttctattttttaaaatgtgaaatgcacttaaaaagcttaattccttttaaactaatggaaacaaattctttcagtgtttattaatatcaatggatcggataactcaagagtctagataatgaagtaacttatacataaaaaaactttttaagtgcggtttgcataatttaatttgtttcctatttagtatataataacccatttgactaaatatataatactctttcttaaatctttaatactctttttttttaatcccactagtttgcgtgtacgccacttctaaatttatgttagtatcagaccttgaccttaacactgtacaatgggaagagtcccaaacatagtaggagtagtcggaaattagagcatctccatcagtagtctctcatatagtttctcattaactaaaaaatataaaatgataataaagtagaagagagattgagaatagtttctctgcagagaaactttagaataatgattaagagactatgtgtatatgtgtgtttataattggacagaagttaaatcataataaaatatcattatttattttttttagaaactttttgaaatatctcaccaatggagattacgctctcttttttttttttccttatatattcccagtcataacttggagttgtattaaatgtacctacgataaaaaaatcacgtgagaataaaacggagtatttctttacctttacaaaagaaaatgaaaataaaacaattaaacttttaaggaagatcagataagtagttgaaagcctttaatctagtagttgaggactgatgagattaagtagtgagaggaagaggcttgaggaggatctctaacattaatcaaactctctcatcttcctcctgcactccaacaaaatcttctcgtctctctttaaaccaatagcacacaatggcacatgaaacaccacccacgcccagtacaagaaagaggatctgcagcttattcttgatcgtttgtgtcattgcatgtattattggtttggtcgtttttatactcatcaacgaatgcaaacgtccggcgccaaaagtagaattagcttctatggacttcatggtgcttaatatcacatagactcgtcttagtgcaaagtgggatttgtccataaggatccctgcagatcttcctggtgactatatatgtcttcaaggagactttcaagtttcatttctttacaagaatgttactctctttacctcacctccacaaaagtaagctgtttactattaacaacctccgataccgctgtcctcagcttcttaaagtttctgttgttgtctccgacgaaaacattagttcgattggaacatacattatggaagatgtcaaagagaagaagcaagtaacttttggattgcagttttctcttaccgattgcagaaaaaagacgttaggagttatgagttatgcatgctgtggagtcaccttgaggttcgaacccggatctgagatgaaggcgtctgtgtttggaaagcatccaaggtacacaaatttctgaccaagtccacgtcaacaccagtataatgttagagtttgcaaagatttgacattacttaagggctttattgaattagagatttagtttatttgtaaatgactttagatttggttcgactttatttagggtctaaagtttattgtataactgtttaatatttgtcaggacttaatgaagatgtaatgtttagactttggtgtattttgtacgacatgcatgatataataaaggaattatcataattaaattgaacttataaaaatatgacttgccttacttctcttttgaaatagaaattctaatgtaggtaaaatgtttgtgtttacataattacattacatcaacaaacgtaaaaaaatgtttgtgtcattaaatgtttatccacgtactcttcacaacgatcataagtcataattcagaaaattcctttaataaatgtgaactgaataagcttttgtatagtcatcaaataaaaagtcaactgtacaattaaaagtccgcaaacatctcgatcgtctaagagacgacttttctcgtaactttatgaagaatatacaatagtagtggcttgatcgcgtccacacatttacattgcgacttttcttgcatgccgtctcacgcactatatttaggcaaaacacaattgtcttcatttcaagactagttcttgttttctccatattcctcaacaacatcaaaatgttgactcccaccatttctaaatccatctctttagtaaccattctattagttctacaagctttctctaacacaacaaaggctcaaaattgcggttgttcgtcagagctatgttgtagtcagtttggcttttgcggtaacacttcagactattgtggtgtaggttgccaacaaggaccttgttttgctcctccccctgcaaatggtgtctctgtggctgagattgtaacgcaagaattcttcaatggaatcatcagtcaagccgcgtctagttgcgccggcaatagattttacagtcggggagcttttcttgaggccttagactcatattctcgtttcggtagagttggatcgaccgacgactctaggcgtgagattgcagcgttctttgctcatgtcacacatgaaacaggacgtaagtatatatagtaacatgtttcactttactcttttcttatgatgcatacatgcatgttctctattaaataccaaacaaaaacaaaatatgaaaacgttagaacttgtttttgttttctaaaaatcattagactaaataacatgttttactagattagtaatatcttttcatcaaacgcatatagcataatcacttttcaaaatcatagaaacttgactagaaatactttgaatatgttgcagcattcgatctaataatttcggtttttgttttagatttctgctacatagaagagatagacggagcctcaaaggattactgcgacgagaatgcaacacaatatccatgcaatcctaacaaaggctactacggccgcggaccgatccaactctcttggaatttcaactacgggccagccgggacagcaattggtttcgacggcctgaatgcaccggaaacagtagccacggatccagtcatatccttcaaaaccgccttgtggtactggaccaatagggttcagcctgttatctctcaaggttttggtgcaacaatccgtgccattaacggtgctttggagtgtgacggggccaacacagccaccgttcaagctagagttcgttactacacggattattgtcgtcaacttggcgttgatcctggaaacaacctcacttgctaacaaaaacatctatttctctgtatacatatataaaagtaaaaatagacaagctttaagaatggaatggcccattaatgttttgtcccttaatgtcgaatatatataaaatccacttagttaaaaaaagacaaaaactttgagatgaaaacagagaaactttatacacagaatcctatgaagtagtttccatcatttttgagaaagacatggaaaagctttgttatgatcaacaccatagtaatgaagaaagcctttgaagatatgaccacttatagttactgttgcttgataaccaatctctgcttgctcgttgttgcttatcgctgttactctcgtccgtttaaaaaccgccggagcttcaattttccccggtaacccctctctgaagcctctctctgcaattttccacacaaaaacgcaaaattcagattaaaaaaggttttgttcaattctagttccaagattcattaccttgacgagaagtggttgtcggaagtagcgagacattaggggaactctgtttatcgattttgagcttcttcttcctctcagaaggagaagatgaagaacgagttgcagaagaaggaatccacgtgctcttcacgtgagtgacacagttgtatcctctgcttttacaacaagttctacatctttcgaacaaacactctttctttgctctgtttccacagtctctgcatactttctctccaactgtgttgttgtcttccaccgccgcgaagtttaccggaggaagagatggccgtgttatctgcgtcggtggtggagataagagaatgatgtttcgaagacctaacatgtagtctggagtagtactgattccaacggcggcgacggaggaggaagagtgatcaggtgggattgagacggcggcgaaaggtgttgaagatgatgatggttgtggtggccatgagagggaagaaggtggatttgccactgtggcagtagtaataataaaagcgcgtggaggctaatctagtaggtggagcttagctatggaggagtctagtaagagtagtgagaaacagagagagagagcaataaacataagttttttaatatttggggttttgacagagttttgtggtcacatgtaatggttaaaaatgttctgcagaaaatgaaataattatctttccaagtggagtggtccacttcattgggaaagcacccgtctaaaacggctttatatcccactttgtgggtctcctctctatgtgcttaagctttgatgggatagatttcttaagaggtttatttggtatggattgcttgtaacaactacactagaacagaggctatatcacaagaagattttgaatcgaatgttttagtttattaggttttttttttttcatttgagaaatcaaacttagaaacattgcaagactcactaagtctagttgtttatagcattcaacttatatgcaagaacagatttctagcaggggagttgatccttgtagatgttcaaacccgaggtggatgcagtaattgggcatagcctgagagaaaacgaatactgtgcaggcggaatcagaaacttatcgtgaacacatggagtccagctatcatctcccccaagacccatgtgtttgtggtccagatgcacctgcacaatgatcaccattcaaatgacaaagacttaactaacaaaatgacaactgatgctcaggtgtttgataagtcgtttccattcttgaattcaaatatatctggtcaagaggatcaagagattgaggaaaagacaatagattactacctcgatgttttgtcctttgataagatcctcttcatgcgttgcacggtgaagctcaccggttgtataataactagcattcatttgcattagagaagagctaccatatgttgaagcatatattcctacaccatctttgtttcggaatgttacccacctaacatctgttctacctccattttctcctggaacaatataagggacatgcatgtctccaacattgtgttcatatatcgccacatgggctgctgcttttcggtctgggtaacactcaaatggacctttgccataccattctacacggtccagtgttttttcaatgtggaattctatacctacacgtggtagcggtggaagatcagagtttggttctacaaaccaattggtgatgatatctccggaaccatagatcagatatgtcacattgactttgaataaggcatctgactttgaagagccagaagctgaagaaccaaggtaaatgaactctatctctacggatttatcagtgatgctctttactgaacagctttcaacaaggaactccacattatctaactgtgccgctttccacctcgaaaaataactagagtcacctccacctttatcattgtctgtaggtgctcgccaaaagcatggcagtatagcttcgttcataaggagaactccttgaatctgtcatttttgaaatgatcttaagaacagaaacattctcactcaagatgaaaaagtgtacgcattactttcactaaaacatcaaccaagaaaagatcttcaatatcgaatctattttttagttttatgttttgcacttttctctttcattgcctagctagttatatacctttttcctatggtagtattttctttgcaacaactatgtactcagtatacccccaatgcgttaatataaatcaggaaagtggttacaaccggttatatcaaactttagatcccaacaggatcgtttacttgagtaactaacctatatgcctacaatatgtaagacttcttccctataatttttatgcattacgaaattgttttagagcttcgcaatcaagaaataaaacagaaaagaacttaccttccaaccttcaatagtcccttttcggacatttaccattagctcccatgaatctttctggctgatcttaatgaaatctccaacagtttcacaagtgatactagtgtctgtcttttttatcgcctagagtaggaggttacttacaattgtcaggaattcatattttctagcagaacgacgagagatctttccaaaagaaatatgacttgtagaggatgtgggaaatacctgcggtattatttgtccctttgctggtaaaggaatctgcgttgaagacaaaagatgaccggcttcaagcgaacgagtaagatttaaaagcttggcatttattgtcagaaacaattctccagcatttgagtcattccagaaagaaaaccatggacctgacttccactccatctcaaaactattttgtggctttatcacaggaatagagagagtcccagatccaagttcaagaccatccccatgaattgtccagctaaactccaattcttctgttgtgttgaaaaagtaagtgtttgcaacctgcaaagataaagtttgagctacatagatggtattaaaaccaaagccaactgagttgatgtatattaaattgtacctttatcatgccatccgtcaatgaaaccttgattggttggtaacaatgcttaacctcttaaacaacgcaaagacatggtgcaaacagaagaaaattagtgccatttgaacatgtatcatggtcaagtagtcagaaaaagggaaacatatgtgatactttttagatttatgttccttaacttcaatttcttgatttaggaaaatatttagaatttccatttcttgactagtttttttttttaactagaatactttttattaggtactggcataagtaaggatgagatttcgtctgtgattctcatccagggtagagagagagcgttggaggttatcggttctcttttcaatcgagagaaaagctttttaagctttcttatcggctttgccaagagaaacgtttctaacagattttggtgatatagttctaatttgtttctatttcaataaagaagagttttttattttctttcgtgattcttaaactctaccagttggtccgacctaacaacggacaaatgccaaaaggtatgactactactcgaacagagagaagtttggaagcgttagagaagaataaaaaaattctgtgtgaaaagttggatagtatgcaagctggtttgaagaatgttttcgatgcaattatgagtttaacaacaatggttgctgcaatccaagggggcacggtatctgaagtatctcaagaaacatcatcagattctgtcgtggtccatataaacaacaaccactgtgccataaagggtcaagcaacagcgattcccaacttagatacaaaggtagaagcagtcttattgaatctccaacctccagttcctgtgaaacgttggcccaaagttgtttgtagataacaacaaaagttcactgaccttccgcggccttatttggattttgatgaggatgattttattgttttggaagggcttgctttagaatgaactctgagtccagccttgaggacaaggctgtttttcaatcattcaacaatgatacgtattaggttatttaattataattcatattacgctatatacgaagttattcgtttcttttactagagtgctttgcttttaagattgactatatatatatatatataagtatgagatctcggttgtgagactcatccaagctagagagagcttgggtttcagtagaggaaaaagcttaaagcttttagtttttaattcttagctatatcaagagctatatcaagatgttaccatggagtgctggatgaggagttcggtcaggccatataagcccattgagacagaagttcaaatcattaggctggtcaccaaagtcccctccatatgcccaacgcttaatgccatctgaccccagtttcaatagcccctaaatgatagcaaaagactaattttatgcatggatttggctgaccatatatatctactgcgctcattactataggatcttacctactttatctttatgttacaagaataaaaactttcagatcattgataagagaagagattaagaggttcaatttaattttatgggcttaactattgtatgaagaatcagagtatactaaaatttaagatatgaacctggtcaacccagtcccatatgaaacctccttgcaggccaaaggtattgtcaattgcctcccagtactcatctatattcccgttgctgttacccatagcatgttgatacctgtgttttattaagaagaaaatctctcaagtagacacaaaagaaacatgaaatctaaacaatgatgcaataaattggcctatatgatgccaaatgcaattcaggaaaaatgaagaaattgatctaacatactcgcataatatcaacggccgtgattcattttgatcaagtgcaatcttgatgatgtcccaaacccgcatgtacatagggcagactatatctgtagaacttgttctggaaccaccaccttcatagtgcaccaaccgtgaggggtccttttccctaatccaacctgttccacaagttcaacaacaatagctgtaagatagaatggatatgcaaattaattctccatcagggatgaaagtaacaaggatcaaagctt

SEQ ID NO: 105 - DNA, 84233 bp, Arabidopsis thaliana
aagcttctagtgttgaccctaaagctgcttctctcgtagaccagctcactcgaaacgctggcgtttttggcggtcccaggtactatttctttttccctttttacccttctttattttctaattagatttttatttaaccaatttaaaagtatactcccttattagaaaaatcttttaaaaactgaagcatgatctctcatttcggtgtttaatgtataataaaattagctgtgaaagcgcgtgattagagcgcatgatttgttattgtcgttattcgttaagtcaagaacagataacaaccgtactattttactattttagttgtgtttagtcttttactttggagtctagttaacttgtgattagaaaaagaaaactctaaactgacgaatttgtaatttcttattggaaaataggataaataggttctttcttgtttgaggttcttaatcacattctatattcattcattcaattattcttgaaatggtgatatatagaagaggaactatggtaagtctgaataattagaatctgtataaacaattaaagtgacacattattggtttatttgaaaaagtagctcattgagaatatcagacgttagggttttggcagtattccagaattcatgtagagtcgcacgtgattgtctacttagggaaccgaccaacttgactagtgtctgaattaaccccacttgctattttcatttttgcattatttttcaagtttttagattgcatcatttttgttgtccctttgggattatgggtggtggaaatgtctgtcttaatgttaattaagacatgcatgatcatgatgcaaactacattttgatacatcaaatgtaatttactatacaaaagccaataggtttttttggtcgtaatgatgtcattatgatggaaatgtggaggttaaggacgattgggacccttacctagaaagatgattcctttttctatggatccataataataattacaagtccttttaaatcgcattaattgtatccttttgactttgtttagctagaatgaataatatcgtataacttctaatgagatggtttttggtggggttagggatgatcaaggtcagagtggcaattcttactctccttatggaggcgacggcggtggcggtgggagcagcggtgggagcagcggtggagggatggacgttatgggaggtacgacgagaggaagcagcagcagcagcggcgatgacagcaatgtcttccagatgatatttggaagcgatgcaccgtctcggccgcgtttaacgttattgttttctttgttaatgatttcggttttgtcgttatcaactctattattgtgacgaatggataacaaataggatttggaccgttcaattgattggtttttggtgtaaagtgtggctctctctccattattttctttaattgtagttggattggcaacaatacaaaacactaaaatgggattgtcaaggcaacgtcaaagacgaactttgtctcatccaatcaaatgctttgtttcatcaatgatgtagcattctcatctttctatgtccactaccttttattcctctaacgaaaattaaggttgtgtagaagtcacatttttaatatagcaaaatttgccgcatgaaaaagcttcttcaagtgatgctaatagcgagttttccatcggttgagaagtctgagatagagagaatcatcagagagaaggcgacaagggttgcggaaggaggagaggaagagaatgttatggcaaaacgattgtctaaagaagctatttcaaatgcagatgaaggatcttgagttcattcaacaacaaaacatagagccttaacaatataggttgcaatggccaaacatgtttctttttccagtccggattataaaaagaaggatttaactttttaagtcatgagcaagtaaattgttactgcataggcttcagatgtgattgtttgctatcatatcttttgagaacttggattgattgattcattggctcattaagttaatttcttagatggtgtttgtcatctggtagctgtgaattagctccactaaattggaacaacagtcgaatctaattgcaatagagtttgaagttttgttttcaaaaggatgtttgtaagataaaaataatataatcaatctaaaaagaagcttggtttacttatgtggatatgtaaaaactttgaataaagaaagcttgtcaaacattccaacattatagatggtattagatatttattcaatcaattttgattattacattcatttgataagagatagtgataataatacttttttcttacttaaggaccatcctcccatttgaaacagtatggattgcttttcttatcacgaggaatacgacaaataggatttccatcatctgttcctacttcccatatacattctttacaaacgggaaaacgtccatctggattatcatctctgtatactttaaaatataaaagtaatgagatccgccattatgccaagtaaagtgacaacgaaatttcgtagttttccaaaagttgacatgaaagctgaaatcccatgtgctattccaaggaatatggaccattccaaaatcatcttcactggatctgcaatgtacattcaaaatttctttattttttaccttattgtgaattacaacatgttttttagctagaggtaaaaagccgtcagtgcccgaacttggtgattcggcaggagcattagaaaaatctaatgcatacacaaaaagaataagagtagaatagatcacaaataatattataaaataaggtttattattgaaagtcataattatgtaaattaaattatgtaggtgtggttaaatagaacttagaaacaccctatttatagatataagaacatgtgattatttttgagagtgaagatgactaacattcatgtaacgttgaatttatgtacttagtttatgttagtattcaaatatgtaaatttttattgttttcctttgtagttatagattctttagctttaataagaaataaatatatgtttggtaaaaatatttttggaacatatcttatatattataatttacaatatttggaaaaatagttaacttttttgactatcaaaaaaaaagaaaaaaatctttttgatgactttgactttgtaaaactattaaaagattccaaagtcttatttttattaaattacgtaagacccatgattttatttcgtttacaaaaaaacacaaaaaaattacaactggttggtcgaaaagatacaaatatattcaacggacttcatcaaatgggctttgcagttgatgggctttgcacgttcttcgaccttttatcagttcgatcagacatataaaagaacatcaaaatcagctttcgttaatgagaattatcatggtaattaatgtatcaatcactgtacatagcacattctgatactaatcataacacaaaagactttgaattcatcggaagttaaacacacacacctgtactttgaaagatgattcctttttctatggatcaataatatgggtggtatgggcggtacaacgagaggaagcagcagcagcagacgacaacaatgtattcgatatgatattcagaagcgatgcaccgtctcggccgcgattaacgttattgttttctttgttaatgatttcggttttgtcgtcaactcatcatcaaagaaaatgtaaaaatgttgtaagcttgtaaacactaaattcctaccaagttttgcaatagatgcaatgaacagcactaaatttatcttctatcacatgatctcgtcagggacgtgtggagtactattcccggtcgccatttacaagagaccaaaaagaaagaacaaacgaataaataaattattagagagtttctaaaaaacattacttttgaaaagaaagatatagctaaaaaaaagtcatcaatgagaattagttagcagctagagaagcagcttcttcaagtctcttccatgtcaattctctttgttccaacaactcgcatgccttagcttcgttctcgagatattgtttctcgcactcctcaaagagctcagtgtccatctccagaaacattcttctaacgttctcagagagaccatgcaccgcttggttccaatgtcctttcatgttcctctccaacgcttcaaagattatcggaaagatcacgtctttgttctgagctatcagccctacgatatgttcattgttccacaagaagagcgctctctctgccacctgcactcctcaccatctcttatcaacaattacactatataagccaaaacaatgtattcacttaggttttgaaataacgaacctggaagtgtgcactattaagacatttcccaatctgtgtaaacagaggaacaacacattgctgaaactcagagggctctgtagcatccaagacttcttccaactctcccaagaagagaacctccttttgacaattggtaagcggccaaaacttcaacaacccgcggatcacagtatcagccaacttataatctttctcaacaaactgtgtcacgcaatacgccaactgctggtggtaaatcgagatacctttagacttgtgtagtggcaaaatagctttcacaagatacagcctatgctcctctctcataggtactgtaaaaccattgatcacacttcctaagatctccaataactctccaatgccaatacacctttcagtctcatacaagaacttgtagaaaatgttataaatcgaacatctgataaacggtcggtgaaatataaacttgccatagattctatgaagaacagttttcaaatactccctctccctaggatcctcagagtcaaacaaatcaagtaacctcgagacaaaggtgtgattgatgaactttttcgcagttttaggttcgatttcggaagagactacataccgcaaaagaagctcgtaaacgagctgcaaatgaggccaccatggctcaagataaggctcttcttcttcaggatcattcccttcaggaggagcaccagtgttctcatggtaagccggtgggagacaccggaaaatgttagcagaaaccatacgtataagctcactctgcatcgtctcattgactttaccagaagaagagtgaaggaaatcaaccaattcaaggagtgtctgtcttttgatctctttctcgcgtggcattatcaaagtatcagagaaatcgcagtggcaagaacacatgtgagctttcttcatgaagagaagaggtcgatctgaggaagacacgtcttttaacaatggaagtacttcgaggatcggtgttgttgtgaacattgggtggtttggtgtctgtgaaggagattgagctgttgtctgagattctccatttgaaacagaggatggagcgggtgtggtggtacggctgccgcgaacgacggtgttggtggaggtattgttgttgttgttgttgttatcttggtgatgttgatctgatttgttgaatttcttctgacccagttttatgattttgttgaacatcttcgattccgaatcaaaatgtaatcttttcttgaaatgaaaggaaaaaaaaagattcttctgtgagagaaaacgaggttaatctgtaaagaggaattgaaacgaagaagatttgatatatgtgattacctctaaagcgatgaatggagggagaaactgagatcggagaaatgcattattaggccaatgggattgtggaagaatgttcttcaggcgaaaccagaaaccgatacaagattgatgtaagaagaatgaaggaggaggaggagatcaaattttttggggagatgtatttttaaccaaacgatagataatttgttgttaaatcattgttttatccgagtaaaatgtatattattgttttgaattttctcatcattaaccggaaaactttttaagaaaatgtatatatttaaattgcataatcgaataatagttaaatataaaatgcaatttcataaaacaaaaattatgattgttaaaattttgagaaacttcaaaaccattttctcataccctttacattgtagaatctaattctctaagagcattattaaagggggatattagggagatattaggagattcttagattgtaaatgattaaatttaaatgttaattaagcaatttagaggctctctaagctaagaggtcctcttaaataaaatgtagtggtgatgtgacatgatttggttggttgggaataatattaaagccgaattttttttcttgccattaattcttctactatgtataatacttcataatatgatagtaaaaaacgaacgagatggttacacttactttgatgtctctgaattcttacaaccagaatcaactagaagtgcacaagtggatttcacctattctacatatatgccttcaaatctcgagaatatattggaaactcgaactcgaattcgtaatcgacaagcacatcaataattaaaatttgatttggttcaatatatatagaaattttttagcagaaatcaatagttaaattttatgttttcatgtatgtttttttttttatatgtcatctatgtatcgaatattatgaattgaataataattaagtttttaaaaaataaaatatttatatattttatcttttaaatatattttttttaagaatcccaatttaatatattaccattgagcttgccaaaaaattaaaatcttaccaaaattcttaataataaaatttcacaaatttattcattaaaaaaaaataaaaaccttagctaatagactaccattaaggatggtctaacattcttcttgttaaatcccttaactaaatatatataggccgaagcctctttgttgggccaagaattttgaccatctgaccaatatggtccaacaaagagaaacatctatggtgctgtagtgtctgatttgtaacattacaaaacaatggaacaaggaataaggtttttttttttttttaatccagtacttttatgatctatgagtttaaaactaaaccaaactctagtttttttctagactcaaagactaaaagtctcattgataactttcaacacgcgtcatgcagcttcattgtctagctctacatgcaaacatcccacgtgtttccactctgcatgtatctccaacactttcgttacctcaaacttatgtaattcatctttataaattacacacaaagccagcgattctctagggactcagtaaggccacctcaaaacaagacccatcgataacagcgatcatggtggctaaagccttagcacagctgataacatgcatcatcttattctgccacgttgtagcttccgtagaagacctcaccatacgccaagtcacggccgacaatcggcgaattcgcccgaatcttctcgggactcacacagagagtaaattccggcttttcatgtccgattacggcaagaactactccacgagggaggagtacatccaccgcctcggaatatttgccaaaaacgtccttaaggccgcagagcaccagatgatggacccctccgccgtccacggagtcacacagttctctgacctcacggaagaggagttcaagcggatgtacactggagtagccgatgttggcggcagccgtggcggtacggttggagcggaggcacctatggttgaggttgatggattgcctgaagattttgactggagggagaagggtggagttactgaggttaagaatcaagtatgttcttatatatatccatatgatttgccttaggcttggcttacatattttattgcaacttagaaagaatgtgaactattaattttgatgcagccaaaaacataaggagaagtagttctctaggtggtaccatttgttttattttgtaattaggcacgtaattatactaattaggtaagagtattatctaagtaattgatattagttggctcaggaatgactcttttgagctctaattaattttggatgacaaaaaaaaaagatattagttggatatataaatcacttggtagtaagttgatacttttacgcagaagtgtctaatttgtgagacaaatgttttttggggttaatttgtgggacaattacatcatacaaacttcaatgcctgtcagtttaaccatatatcatgcatgtgattatgtgaagggtgcatgtggatcgtgctgggcttttagcacaacgggagcagctgaaggagcccatttcgtctccaccgggaagctcctcagtcttagcgaacaacaacttgtcgattgtgatcaacggtctgtttttaatccgttaatcaacgaatttgtactcttgacttgatccttgtaatttgaaaatttatttggtatatatatgagtatagtgcgatccaaaggacaagaaagcatgcgacaatggatgtggcgggggactgatgacaaatgcctacgagtatttgatggaggcaggaggattagaagaagaaagatcatatccttacactggtaaacgaggccattgcaagtttgatcctgagaaggttgcggtaagagtactgaacttcacgactataccactggatgagaaccaaatcgcagcaaacttagttcggcatggtcccttagcaggtgatatatattagctaatgtatatgtgcaactataaaacagatttgaagtccgagtctttagatagttttcttgacacgctttgttgttgtgttccacagtgggattaaacgccgtgttcatgcaaacatatataggaggagtgtcatgtccgcttatatgcagcaagcgaaacgttaaccacggagtacttcttgttgggtacggatcaaaagggttttcgatcttgcggcttagtaataaaccttattggattatcaaaaactcgtgggggaaaaagtggggagagaatggatactacaagctgtgtcgtgggcacgatatatgtgggattaactcgatggtatctgcagtagccacccaagtttcctcgtagatgggtcttgtctttcctctgctctcttgttttctaatctagggtttgatcatgttttaggagtggagtttggggtttgaatattgggttgtttctttccgtgaccgttcttgtagtaaaagtgggtgattatttccgttttaattttttcttagtcagacgtaatcgactatgaaacgaccacattccacacatgatctgtcgttagcttaaagccttaaacatgttattactagatcaaaaactacataacaaataagaattgttgacgggtacttgctggcgagaacccgtaaacaaacatagcataatccaatttcaaaatcttgcatgatatttttcatataaaataacttggttttgggattttggaatttttgggcctcgaggctcattttcgattttgtgtttgagaatataataacacgtcgattcaaaaaggaaaacacaaaatagtagttctccatttcattttatatcagattattacaaaattttataaaatgattgatgctaaaaataataagaggcagttgtaggaataacttaataaactttgaaaataactgtacatgttctttcattaaaaaaaaaacgacaaactataggaaatttgtttaaacatcttataaaaattagaaacccactaattctttatgttgaaaaaaatgcatctgcctcaatcttatgctttagaatgaaagaacagaaaaaagaatctgctttttcccccaatacatatatgtgtctattgatgcattcaacaattaatcaatagataactgaaaagagagaatttacaaatatggttaagaaattgaccaagtcagattgccatattttgatgatgttgttgttgtcgtaatgtggaatgagacgtgagagtagaccccatgatgcttacccggtgctaggcaagagtatcccactaaaagattgtcttctactactaacctctcctctcttctttttcttttttcctttttctttgtgaactctcagattttcaacttctcaaaagacaacaaaagtttattgaataagaacacacaatgcgaactccgaacccactttgttaaaaagtttcactttcggcgttcttttttatgcgattagaagaagtagacaaaagctaaccatcttgtgaatatagaaacgagtctcactctctctcatttttgctttcatgcttaacttgtacttgatatataacttaactatatgcgattaatttattctgtttgaaagcgatttgtggatatggtcaaatttgaatccggttacgatatatgattaaaatgtgaatccttgttaaatatggataacaaatttcaacatttaaaatgttaagaccttcaaagtttaacaagagaaacaaaatcatttcatctacctctgtctcggtagttcaactacgtgtaaggttgtccacccagaaaatcatttttaaagattacgaatctgaggatttggcggcgataagggttagactaatattgttgttctctccaatctgaggacttaagtgcaatttgacctaaacatggaattaaaccaaacctaaataagaataaatgtcatttaaaaactacaaaccaaaacaatccaaaaggtagatatactatcgcaaaagaatattgtaatccaaactaaaccaaaataatattggattgacttattagatacttttctttgaaactaaaagtcaactagaacccaatctttgttctaaattgaaagtctgagactactatagttaagcagctaaccatggaattattgttgtccctatgaaaaatgacgtcaggtaaagaaggcaaccaaactaaagatgaaatttgctactagacatatttggaccgacgcatgaaatcgatagatatgaaaaagatctcaatatttaaaacaaaaatctatatatagttttgtaaaacaaatgaaaatttagtttcgagtgtcggtggatgagaccgaaccgacaatcaaagacgtggggttactcacagatatatgtgacgttgttctccgcaccggccctccctcgacggacgcacacgcgcaattaccaaacgacaacatttgttttctttttgttgatttaatcacattccttatgagttttttttcttcttcttctttttaatcccaaatgatgtgatcacatgatacgttctattcattaggaagtttcacatttttggaaacccacatgaaagttaaatcgattaatcaaagagattttttcatggcgtttacacgtagttttcaacattaaaatagaatctgacaaaatccaacattaaaatagctactattgattgatgataaaaagtgggattttatgactattgtcattaatggtgtcgtatcacgaaccccaagagtgttttattggatgacttgattctatcgattaaaatatttgattagtagtagtagactagtagtaactcgttgaattggccggactagtggaatgtttccgtgattcattccttatattttatcaaccagataacttttgcgttttaaattcatttatttgttaaattccttatggttcagaagttagaatctaaactgtctctttccacataagcaaaaggcaattaaagaaaaaaacacattttgcattcatttgggttacataaagctgattaataacttttcttgagctagtggaaatgtcaaagaagaaatcatgatgattacataggaaaacaaagacaaaccgaaattacaggaatcatatttttttttttttttttgggcagcatggattaaggagcttgagccctctttgcaagatgataggtgtttccccttttctcatcatgtctcagaaactcaatctcaaaaacacaaatctatacaacaaatcataacctaagaagaaagaaataaaaaccttatcttaaaaaaatcatctaagcaaaccatttcttatttcatcgttctcttgcggtcacaccgatatctttatcacttgtcttttgatctgctctatgcacggattgcttgaacgctacggttggagcgattctgctatttctcctttgatgctcgagaacaagttccccagctaaccagtcaagcttctcgaagttgctctgttcatcgattcttttacctccaaacaaaacagattcaacattcttttgtttaagcatctcctctgctactcccatcagcatattcacattgctcccactagggtctgtgtccatgttaggactccaaggtcctaagttcgacccattcgcctgcacaaacatattactattatttgtgaaaaacctacaagtgcatactttatatcatccaacaatcctactaagctcatatacaacaagtaggatttggaaatgaacttatataacacgaagattattacctatcacaaatttcattaaatcgaaagaaatactaggtattcaagaaaatcaaaaataatttttgaagttatcaaatgcaattctgcagtgtggcccatacctgaatccggacatagttactactgcggcagtgaccaaaagccatggccacagcttgatcgacagtgtcagcagcaccgtcattagaaataagagctgcggggcgagcccaatgcttagccttccacttgataatccgatcatactcatagctaacatcaagcaactgacccataccaagagacaacacaagcaaatcctcaacacctcgcacaaacggaaactcctgcttgttgtgcaggacatgcgtgattgcagccgctgtgggattgctcatggctaatcctccaccaacagccacacacttggtctgcccatcaaccgacttcatctccacgggctcaaacacacccggctcagcccaagtcgctctacaaacctccgagagcctaaaatcatagccgtccgtctcaagcgcatcggcccgtgagaacagaaacgggccagagcttttgaggtcgtagcaaggtataagcaccggtttaagcgtgtcctttaaggttagctccgagaaagactctttcatcactttctttaacttagccgtcccggaacaacaacccgacccggttctcaagacccgtttcaagattcctgctcctccgtaaagacccttggcgtttctcgttaagaactgccacgtgtcatctgctttgaagatggggcggttaccgtctcttgacccgaacaacatggctgtgtaaatcccacctataccggacccggcggctacgtcaaagtaatcggcgattcgggcattcgggtcacccgatttagatttcagagcgtgttctagataagccaaagccttaccgggtaagatccctctcattccacctccatcgatactcagaatacagattttacctctctggttcttaatcgacccagcaacaaccgaattcgcgggttcgggtttcgagtcgtcgtacccgaaaagaaatttgctctcaagaatagagaaaatctcgtagctgagtttatctgtatcgatgcttggttcctgcatatccgtcaagagactatcattattattataatcattcgccgacttggaagccgccgtagctccgtcgccgcctctctgtttgattaaatgcttgacggaagcagtagcggtggatttaaccggtttattgcgtactctatgcatgatgattgagagaaaacaatcaagtatttttttaccctaattaagacataccatgaacaaacaacacgaagagaggtttcagaccaaacccaaaaatgaaaccagtcttggacttttggtatatatataaaaaatggtatcaaattcaaacaaaagtttgagtctttctttctcttcttttgcgaggaatttttcaaaacatgtatctcttgttcaaaacacgaccgagctagtcttttgcccaatcagaggaccgaaaaaagatgaatctttgtgtacttttaaagcagaacaaatgaaacaccaatatatagaagaagatgaagaagaagaagaagaagaagaggcaagaacagaggatgtctgttttgatgatatatatatcgcacgcttgacttaaaacctccccaccaaacccagattgaagagaaaggacaaaacaaaacacggattattaataaaagaagaacgagcaattaatcaattttattttatgtactacaaacacagaattattgctaacaattttgccatcccagagacttgtagttgcattcacttttactgagactttattatttctatacttgcgaatggttattttttttttaaatgctgatatattggcaacaacaacaaaaaaatgttatttttgatgctaaaattttccatattggagtatgaaaaagatctttctgttatgagtgtttactctaataatatactaactttttggatttaatttttccatacaagagtttcgaaggcatttgtttctgtttacaaataaaatttatagattgggaaaatatgtaaagcataaactattagtttgataaacttgagacgttacttacatttggaaaagaaaggtaactttgcaagtatcacctaatctttactctgcttctttgactttcttattttacataacaaatgtaacgctaatttagagcatcaattagtttacatactatcaacgttgaatgcttttccttttttttttcttttcaaatctgttattttttcttttgccatagttgaaatgcaggtaagataatgaaatgctaataaaatatttatatttttagtatatattttacggaaaagagatgtctagtacttttcttttttccttttttcttttacaaacaaaaaacaaatatcagaaacgtgtgtggatggactctagaaataaattatagaatttttaatagtatattatatgatattagatttatatgttgatgtaaagtttgataagtcaaagttctttcgtgttctctactattatgtggaactaggatatgaactccaccctgaaactcattttcgacaaatttttgtatttatatattaaactacaaaataatattgattttgcatattgagctaggaacaaaaaccgaaattgaaaaaccaaactaaaccaaaccaaaaaaggattctggttctgttttagatacccgaatagaacaaaaaaatgtttggtcaaccctttacaaaactaagtccaatacattttttttttacctctaatctaattaatttttgttaatttttctgatattttggtttattataattttgtcaaaaaaagtttccgatatttagatacagtccttttagaaaatattttggataaaataattagaaccgaatcgagttgaaccataactttttcggtttcttatggatcttcagagtttagaaccgaaagaagcaaaccgaatataaatgaatgctctggcctagtatttatgtactaaattattataattatatatttaaatatttgaatcattacaaaaaatttaccaaactatgcggtagtttaacgaaaatatgcgataaaaaaacataaccaaaataaaaaaattgtaactattttaattgcaataaaaattataactattttaactaaaagttgcaataaaaagttgtaacaattgtaactacttttttattgatcaattttgtcatattaggaaaaacaagggggaaaaaaagaaactttgcctcattgtaagcaatgttaaggggttcgaagcagactagtgccgccatgaacttgtaataaagcagatgcctacatgttgtgcaacttttttgtaaaaatgacgagttttggtggggaagctttaaaaccaatggtaaagaaaaatattgacaatgctacactattaggtgttcaccagcctatggaccgcagtgacacataatagaaaaacatggatttaattgtttaccatgcttttttcaatttctatatcttatataacaaccatatctcgttaaaagagaacgaattattctctactaatccatagtacgagagaacacgttggatctagactaataaacagtgtctcttccatatgaaactcgtacatctcttatggatttttatttacgtctattctatatgaactttgaaggtgcatatttttgtaaaccataagatctatgataacaatggttttggcagaaattgtgtggtttctctacgcttcgtaagaaatcttttgtgctagttgttatgaaccacaagtcgcattaaatcaacactcaatgtgtggatcaaacctccagttacatccaaaaacttgagaaaccaaaacttctttaattattcatttcatagcatacaacaatggaaaaaaacaaagggcaaaacattttctatcatttatagaagagtcatcatctatagccttgttacacactctgttccgatcatcacaactcatccttggaactatcaccctcgatcttctcatcagatttcatggtcgagatcaccggttcaggtgtcgccggtttctcaagtttaaatgggattgatgcgtgcttcttcaggaatttgtacagttccactactgtacggtcaacatccacagcgatctgtttttttttggtttacaagagacagttaaaacaatttcagtactcaagtaaaaatatttgcaggttttcaaaacactgtttgatatagtgaacaatatttgctaaccggatcgaagcttttgtttccaccagggaagaacaggattgttgggaacccatcagcctgaacaaaaagagattaagacaaaaccaaaatcagatctctgtcttgaatcaccaaaagctctttcgcaattcttttttcttaatcacctttgctctaggatgctcattgctggtaccatccatctttgctacaactaacgagtcaatgccttttaaatactttccaagcttgttgtaaatcggctcaaatgattggcagtggccacaccaaggagcatatatctatgacaaaacttaggctttaggtatatataaccctaagatgtataagcaaggctctaccggtttccattcaaaaatttaagtgattattacctcgagaagaacatcctttgactcgtcaagaacaatctcatcaaaattgtttcccacaatgaccttaacatcaccatcgttctgcgtttcatttaagagaattagttttgtgtgcagatgttagatgtgttttaaaatatgtcagacgccttacattttccggtagtggatctgacttgtagaaaggcttcagtttgtctgctaggaaatcttccgcaagtgtctatttttaaacaaagtcattgcgttaagataaccaacaacacgccctgaaaccataaaatttcacagaaaatagaatgttgggcctaccttaatgttatttacggtcaattcaccgtccagaataaacttcctcatatcttcattaccagtgtatacaagaacctgcatacgcaaggaaagattggaaacttagatcttctggttcacagtttggtttgttgtatcatgtgcatcacagaaacaaaaccgatacacagatatttcacaccaactactttaccttgggggcagcgccggtaacaccaaagaatccagaaactgcttctccataatcttcattgtccatttgcacataaacgaaaacaaactgcagagaaaagagaagattgccctttttattcaataactaaagttataatccacctctccttttggtatatatatatatatcaatcgcaacttataaataatcgtacgaggtggtttttaattattccagaaagtgagcaaaaatgaccaaagaaaattcaaagataaaaattacctttcccttgaaggactttgccacctccctcagagtgggaaggtgcttctctgattcatttgccttggcaaaaagaatgagctgaaaagggttttacaaaattccatctcattagttaatagcagcaagaaaataaagggaaattttaaagagacaaatggtttttacttggtttttcactgagctctcgaaaatcagtgatgcaccttcccttgtgaagttgatcaccaatgggactttgttggctgacacaaactctgctatagccgttttagtgaagtttccatctgccaaagagaagcttgatgagagaggcatagaggaaatctaagtagcacaaaaaaagaaggtaatgtattcgaggagtcttaccaaaacgggcaagtttctcttcctcctttttcagtaaaactaaggcaggacgcttgacttgggtttcaatttcaaatagctttgcaatatcagggcttgcagtttggtaaaaactgagatcgtcttccagtctggacgcagccgcgagctcctcactctctgacccctgagcaagagaaaatggtagcaaaaataagatattaaaagcaaaatctttcacacttgtcaatccaacatcttaaaactctttgccacacaaagtaaaacacactagacaagaagatctgatatacaagacctaatagcaaccttacatatactgcaagggaaaccactcgtatccttgatatactaaacaccagaggcactcatttgcgtaacgataatagtttcatttcttatcctttctgaaattctatggtagagaagtcccacagtaaccaacttggttgacaatatgtttaaagctctgagaagttaaaaaggagaactaaatccaagaaagaacgcaagaaacaccatggatttaaaggatgcataccactaatgagttgagaaaaccaaagacaagtttaggttcagcggacaaaacacgttcagcctcctctttagtagtgatgttgtggatgctaggactggccttcttcttcagccaagtcacaataccatccctgcaatgaggacaccagtaatggtgaaacgtactttttgaccaataattcgtatggaaaactaacagatgagaaaccaaagcagagagaataaaatcaaagatcacatgtgacatgcctctctctattgtaccatttcataaaggttgaataatcctaaaaaattcttctcggattccaaatcaaacaatctctcaagatccaaagctaaacctgatgagctatgttcatatctcaatcctaacagttggagaaagaaacattgtacacttactttgttctttcaccttcgtaggtcttgcgcatttctccgtcgacaaacaagaaaacggtggggaagccctgaatctcgtacttctgagccaaatccccttcctccgtcgcgtcgatcttcgcgagcgccgcaaggcctttcaactccgtcgcagccgcggcgtactccggagtcaaagcctgacaagcgccgcaccacggagcgtaaaactccaccatcgcgaagctattgttgccgacgaactcggtgaaattgtccttggtcagaaccgccacgtctttctcgtcgactggtggtaacggctcctcctcgtaaccgtgatcgccgtgatgaaactcgccgcctccttgctcgagatcatcgtaattctcgaagtctcggtgctgatgatcgtgctcctcctcgtggtacgaaccgccgccgtggctttgttccttggattcctccgcggcgaggaaagccaattcttcgtcgagatccgatccactggacgcattctctgcacgcgagttaacgagaagaagaatgaaagagacgaagagaaggagagagatacttgtagatgacgaagccattgttgtatgtaagtgtgtgtaatcaaagtttgttggattttgggtttttataattttcagcaaaaaaaaaaaaaaaaaaaaagagtcaagaagactgtaataagaagtcacgtggataactcgaatgaacgagtgacacgtgtccactatgagtcatcgttgacttaaacttagatctagccaaggacgtggaagtgtcatgctcctggatttattgtttaaagccggagtcgtgcatataaaccaaaccaagaccaatagtgtcgtaattattagtattatgatgtttatttttattatatattgtacaagtgtggtaattttatatttgtagtttagcatatatacacatggttttgatttttttgtatttttttttacagtgatcactcatcagatgtgtctaaaaagttatcggattatatatccattgaaaatctgttagaatcgatatgttttataatattataacagatctattgatcagaaacctcgtccaagctactcatattgcagaacctcataagagcgtagcattgtttgtgttgactatatgttgatgaagcacaaacaatattgaaagatttatggaaaatgtacaaacaatattgaaagatttacaaaccttctatttttttcttcacatgtttaccaaaaaaataaaagatttgcaaacccgaccaattattaagtcagaatacataattaatgtatagctgattttctgaagaaaaaaaaaaattaaatctactccctcgggtgtggatcatattttttttttcactagtaaactatttttatcaaacatatccaaaacatacatggtgtcaattaatgtgatttatcatttgttaaatagttttaaagtcttgacaatgcgatgtcaatcaccccattatcttttttataatatcaattaatttgatttacggaaaaaaaaaagatgcttatatatcatctaatcttttttatgatattaattaatttgatttactagaaaaaaaaaagaaaaaaaaagggggaaaatttggtgtcctccaaatttctattttcctccactacaagcagttttaaaggcattccatacggactatatttttagtttgcttttatttttagtactcacaactctttatattcaatactttgacgttgatacacatacacacttgtggatttggagggtcatatcaacatcataaccatgttttgggaagtgatagtcgttgtggtttagcatattaacatatgtatacagtcttgacatttcttgacactgattactttcatgagatctgtttaataagttaccggagtatctccataaaatccgttaaataatatgttctactgatcaattatacagatatatataactgagaaccttttaaacatcagatcgttaaaattataatgagtgatgatttgggaagatattggcgtcaatacaattacaaaccatagacgaatcaacatttcagctatttggcaaaatcatgaagagcactaaaaggccttcaacgggaacccttctttaatacctctctccattatcgctttctactccaacataacagtgacaaacaaaaactttaaagtgatttctatctttgatttgactcaaaagacaagaacaaaaccaatgattctaagggtaataaaagtaacaagctttaccttgattaattcagtgatcatcccaggtctttccttaaaccttttctccttccattgaatctcctcaggtttgttacaagccaatccctccattgaaccaacgggtactttgatcgtccctacatgctgcaaaatcctcagactacctgaacccagtgagttcttgggatgttaaaatatacaaacatcacacaacacattgaaagtgttcaggccaatatatatgcgagaagatgaaaaaacagattatggatatggaaagatctacttgtaatgaaggcttcttcccaaagctcacgctcagaccacgaaggtgctctctcgcggtatggaatcccctcgcttaaacacactctgacagaaaagcaaatcttattggttgatcaggccataaacacagacgaatataatcaacattcttaatggtctaacatattactcgatgacaaggtctcttataactcctgctagcacaccatcagttataggcgcggtctgcacctcaaactcgctcaaactcccgccgtagagattctctgatgacttcacctaaaatgagatcaaacagtaaatcatgcagtggtaaaatgaaattcaaacttctaaaatgcaacataaatgaagacaataaacatcctaatcacaacataggtgacttgtgcttgaacaaaaaaaaatcaaatttttgttagtaccctgcggcaaactacgaaaaagtttgtgatgcagccctcaagcaaatgatcaccatcgtttgacaaaagaagttcagtggtcaaaggaggtctaaacttctccagaggcttcctaagcctgcctaaatcataaaccataccgagattaagaaagaaacaacaaaactcaagtaatccacaagctaaatccctgaaaaattgagctatcagtatcctcaagaatcagctaaatgagcacaacaagcacaatacctaacccagtctgagtatttagcagcagctacatctcgtccacgaccaaccaaagccaaactcgcggcattttctccaacacctaacgggcctaaaggcgagtatgcacctatatgcaaccacacatctagaaaatcccaattgttcccaacatctaacctattcaatttctccacattaccagtaacaagaacagttactgctaattcttctccatagagtctttcactttccttgacaacaacagacttcagggcctcgctcatagagccattgactcgatcgtaaatactcgaaccaggaactggttgattcatccaaaaccgcggtgatgacccagaactgaacaaaagctcgggatttgacttcaaaagaatacgaatcgagctagaaagtctcttcatgtgtctctcccagaacaagaaactagtaccattgtttatcgttctcgtcgttgtataagcacctgtagatagatttctcaaaacttattaatcaaaaagtttcaaacttttgcagtctatttagttttgattgcatacccgtgtgcgattcaaggaaggtagtgaccggaggagcctccaaaacgacaccgttgtggtagagaaatctgcaattcgacatttttgcttctctcttccttgaggaaattagataaaacgggaaaagagaacgtttttaaaaaggaataatccccaaaacgacgccgtttaatagacataattagggtttaagcttctttttttttttttttggtgtatcttcgggatttcaagttgtctcttttatttatttctccgatcatcttttctctgctgaagatagttgagagaagaacctcgaaagatgagatctttattggtttttagaaaaatcccttcacggattcgtcttcgtaacttgagaaacaataaacccttttgttcacagtctcagtttcccaaagaatctgagaatccaagtcaagagcagagactactagtttacggatccacttctgaagaaaacccagttacctccaaagtgagtcttttgtctgcgaagcctgaacagaaggacgatgcatctgtaatcgatgttcttctcaatcgcaggaacaacccagaagctgctcttcgtttctataattgggctagaccatggcgtggaagttttgaagatggtgacgtcttctgggtactcattcatattctggtcagttctcctgagacctatggacgtgcaagtgatttgctcatacggtacgtttctacgagcaatccaactccaatggcaagtgttttggtcagtaaattggtggattcggcgaaatcatttgggtttgaagtcaattcacgagcttttaattacttattgaatgcttattctaaagataggcaaacggatcatgcggtggatatcgtcaaccagatgttggaactagatgtgattccattttttccatatgtgaataggaccttgagtgctttagttcaaaggaattcgttaactgaagctaaggaactctacagtaggatggttgccattggtgttgatggtgataatgtaacaacgcaattgttaatgagagctagtttgagagaagaaaagcctgcggaggctttggaggttttaagtagagctattgagagaggagcagaaccggatagtttactgtatagtcttgctgttcaggcttgttgcaagacgcttgatttggctatggctaatagtttattgagagagatgaaggagaagaagttgtgtgtcccgtcgcaggaaacttatacttctgtgattttggcttctgtgaagcaaggtaatatggatgatgcaattagattgaaggatgagatgttgagtgatgggatatcgatgaatgtagttgctgcgacgagtctgatcacgggacactgcaagaacaatgacttggttagtgctttggttttgtttgataagatggaaaaggaaggcccctctccgaacagcgttactttttcggttctgatagaatggtttcgtaagaacggggaaatggaaaaggcgcttgaattttacaagaaaatggaagtcttaggtcttactccttctgtctttcatgtccacacgataattcaagggtggttgaaaggtcagaaacatgaagaggcactgaaactctttgacgagtcttttgaaaccggtcttgcaaacgtgtttgtatgtaacactatattatcctggttatgcaagcaaggtaagacagacgaagctacagagttattaagcaagatggaaagtagaggtattggaccgaatgtagtttcttacaataacgtgatgcttggccactgcagacagaaaaacatggacttggctcgtattgttttttcaaatatactggaaaagggtctaaagccgaataactacacgtattccattctgattgatggatgtttcaggaatcatgatgaacaaaacgctttggaagtcgtcaatcatatgacttcttccaatattgaagtcaacggggttgtataccaaacaattatcaatggtttatgcaaagttggtcagacatccaaagcaagagaattgttggcaaatatgatcgaagaaaaacggttatgtgttagttgcatgagttacaatagcattatagatggatttttcaaagagggtgaaatggattctgcggttgcagcatacgaagagatgtgtggcaatggtatttctccaaacgtcataacttataccagcttgatgaatgggttatgcaaaaataacagaatggatcaagcattggaaatgagagacgaaatgaagaacaaaggtgtcaaactcgatattccagcctatggtgctcttatcgatgggttctgcaaaaggagtaacatggaaagcgcatctgctctgttctctgaactccttgaagaaggattgaatccaagccaacctatatacaacagcttgatttctggatttcgtaatctgggaaacatggtagcagcccttgatttgtacaagaaaatgttgaaagacggtctacgatgtgatctgggtacatatacaacactgattgatggattgttgaaagatggaaatttgatcctggcctctgagttgtacacagaaatgcaggcggtgggtcttgtccctgatgaaatcatttacacagtaattgtaaacggtcttagcaagaaggggcagtttgtaaaagtggttaagatgtttgaggagatgaagaagaataatgtcactccgaatgtccttatctacaacgcggtgattgccggacattatagagaaggaaatctcgatgaggcttttagacttcacgatgagatgcttgacaagggtattttacccgatggtgctacatttgatattctagttagtgggcaagtcggaaacctccaacctgtacgtgcagcaagtttgtagtctgccaaaaccagaccacattattgactgatgacttagctttggcttttcgtgagaccccgataatatgactgcttaaggtgtgcacttttcattttgcacggttgtagtataaatgttgttattcatgaaagagggagactctatagactttctgtaaagaaactaagaagggccttctgtttttgtcaattttataaaacatagaacgaattcaaaccagaataatttgactctgtattcttatactgagcttctttatttcccaactgaaaccaggttccagtttttcaaggtcttctgaggcatctatgttggtgggtgatgaaaccagtgcactgagtccttattaaactcttcatatgattcttctagcatatcgtctgctcgagtaaggctactccatgtgaactggaacaggaaaacacaaagcccttttgaaatctgccagattcaaaacccagaaaggaacctgcaactgacacagagaataatatccaccggttagcctgcgaggttatagttatcggaaccgttaagttacaagattcggattatctttttatttgtctgtcttttgcctgcttctgagatcaactttgctcataaatgatggttttgggttaatcagtttatagcttggtctaagactcttagttgctactgcccactggtggtgatgtgcttttagcttttttatgtgcaaattcttcgtgatgataaccacgtttggtatataattcgagttgaagttagaacaaacacttccaatatttctcactcattaaggaaagaatcaaattttatccttgtatacaataatcagatagagtaaaaatatatattagttaagagagtgtagaacgatcctatggatcaaaacaattggacatggaggaagaggaacttgtcatgctgataaaagggaatcctgatgatgctgcaactgtcttcagaggtttcatggttgccatgggtaaaaatatcgatgattgcttaccgtataaacccatcgtggaccgattgatacccttatagtaatcgcctgttgtcaactttatactttccgatgatgatgaaattccgagacttagttcaagatcattgtgaccatttcctataaaaatgacaatgttaatggataagttgctcaaatggagagtgctaaaaattttatgaaaaggttagctagcttccttgatcagatttaaagtatatgtaaaatttgtggttagtgttatatatagattggcaatgttcacttaaatttatcaaccatgccttataataaacttagttacattctgagtcacaccatattaatcaattacctttgatatgggcaccaaacttcatggctccttctccctttcccaactcattgtattttattgctgctgcatcccatcccctacgaattttgcacatacgtataaacatttctaagtttattcacagcataacactaactcttgtttcattttttttttttaacaatggtattctgtgaagcatttacaacgaaacataaaaggtaaacttaagaaaccatcatccccgacagtatcaaactcttgaaacggacgatggtttcaagcttgcacctaaatggaaacaaacgtaacgttggcttggtatagtttgagggggatatataagtaaaagtatttgaaaattgccattcacttagaaaattaaatttgagtagaaaattttgtaccttcacgaagttttttttttttttttactacttagttttgattaattgtatatatatggactaattgatgtatatatgattgaactggataaaagttattctttcttttagtagtatataaaaataaatattattaattagctagctagtttataactttttttcagcaaactttaaaattgtgtaagacgacaataacttttccaaaaagtgaaggttaggctttgaatggtaaagcactagctagatgaatagatagaataaaaataaattgaatataggtgaaatatagttaagataagtgacggatttataatattgtcatccatgatccgccaagtgaaatgtattttccatgatgtagattgtgtaaatagtaaaattaggccatttcatcaaaaagtagggaatatttcaaccatattttattcatactaataagactaactatttgcactttaaacttgtcaaaagattacgtgtctaacaaaatggtacctgttttggaagagatgaatctgatcatgagttttgaattgggtgcatttttgaagagccaagcctttgtatttggaacttcctcttccgaaactcgcactctctcgcctaagtgtttgcacgaactccaccttatttaaattcttcatctatacataaattgataattttaaagatccacatgtattatttcgaactatacagggaaatgaatcatcttcataacgtaatatatatatatatatatatatatatatatatatatatatatatatgtttaaccttatcgatgtcatgcctataatcatccacgacgaaattgatgtctgcatcgagaccacggaatttgatagcagctcggtcgtaagccctggtattcatttatgaataagtcaaattgatattaattatttattgtcttcaacaaactctaatgtgtatatgttgacaaaattaaaacatattcaaatgacgaatgttgtaacaaataatgtgtatatatatatatattttaccttgctgctgcgtaagcagtatcaaacccgcctgttaaaacgaaaattaagtcaaggaaaaaaagttagattaatacaaataatcaacttgtgttcacttaaacgtgaaagacagaagtaacaaacataggtaaatgagctgtaatagtctattatgtttttttgtctttttacaaaaaaaaaacatacatcctttaaaaaaaaaagaatagaggtagttgacaaaaaataaacttttttaacagacgttgtcagagaagatctacaaatcaaaattatcacaaaaatacgattgttttaaaattcatcgtttatgcctaaaaatagacacacacgtaattaaagatgacccaataattaaataaaaatctgatctacttacccaaataaacttgctttccacaatccctacaaattaatcaattccaaacccaaaattagagataaatatagcaataattcaacaaataacaatataaaaatgcaatgataatattaaaaatgaaatataatttgatttaccaaatatgagattcccaacgaccggtgcgacggtaaaaagtgacgccacgatattgggagctacgagaccttggtcctcttctgctcttcttcaccattttctgtgtatttctttgtaaagaagaaagattcaaccagtgactgtcttccacggagaattctatattccgacgagcatcagccaccaccggaaagagatctcctgtttctttatgaggaggaggaggaggaggaggaacaaggtcatcgtcgcgtttgagaattccaaaagcgatgaaagcatctctcgctgcagagtctgttgtggaggaggaagatgagttagattcttcttcaccggtggttgagatcattaatggtactttccgatcttgatcttcgttataagaagaaaagatctttaggttaagatccaacatgatcgaatctttagctataaacgacgttgttcttttttccggcgagagagagagggagagagaaaaaagagagaggataagtgtcaaaaacgagagagagagagagttctaaaagagggaagaaaaaaaagaacgtgggacgtgttcactgtgaaggttgcattggatacacttgccctttatttgccttttcaactctttttttttatatataaaattgatttctataattatatgattgtacttgccttgccgatgtatcgaataaacatattttgtactatatattagttttcatttttgttaattaaatatgggagagccgtagatagggttgtacgatgagtttttatatattaacacttttgatgttgtaaactcaaccgcgttaatacgatgtaataacaaaaacaaaagttttctcttccttttaagtgaagtcgacctgtaattttaaaatagtaaacaaaactaatgccatcaaataggtgaggagagtaaagtataaagatactagcttatactattacttatgttctttagccttctacttggtaaagagacctcgtgaatataatatgatagattatttttccctcgtaaaatacagctacttgatttatctaatgatacatcttttgatcaagtcatcgacaagtttaacaaaatagataacatcataaagagtttaagaatttttttttaatgttgttttagtattaagatcaaaaccaaaagtcaaaccttaaaggacgtattatattgtgattggttgaagagtaagtagtttttaatttctatgcattatatcaaaaaacaagcgttattacttttatttttcaaaccaaagcattctaatttgatatagtttaatgccgaagaaatttgttaatgcatgctcgaatgtggaattgtctgtaagattataaatttgttcttaattgacaagtgtacgttattaggcctagtgtgaccacaaacaaaatataattgaaaataagatagccccatcaattataaaagtactaaaaagtcaatatctgaaattttcaacaacctaaatctagcaatattaggaatttgccgacttttacaaattttcaatttatccttaattagcaacagattatatagcgattatcgatgcgattatgtttgttattggtaacacaatttctcagcaaaatttagaattttgaggaataatgagccgttgttgtcaatttttttttattttaaatgttatttcttaatcattacttatttttatccttccttacataaaatgacctaaatatctttgattttcggaaaacgtaagttaatgatgagaatgaatagtagatgggtaaaatccaataaataatttttttattttttttggtaaggataaataaatttttatattatatctgaatttgtaatttcttctaacatgttagtaaattatacgattaaaaaagaaaatatgaaacacaattcaacatagttatttcacattttaaagcattcaacaacaaaattaaccggttaacatcgtctactctctgcattttagtaataaaattaggtcattatttttcgataaaattcattaaatttggcatttagcgacaacaattattgataggtccctcgtgtgattccaacgtgtcaagatatgaaaaaaaatctaacggtcagggattttttggtacttcgcgtcgcaatggtatcttctcaacgtgttaaataaacccacatgtgattttgtttctctatgcgtcatttaacgaatcaggacaatcctttctctatctttttttctttttcttttctttattttgccaaaggacaacccttttccatttaaattaaagattacgatatatggataaaacatagcaacgaaaaattagagagaccgacagattttttttgttagttttatattatattttatttatcacacattttagaagaaattaaacctagttgttgtgctttcgcatcccaatatacataaatcacaatcaactgagatttcgtaagagttgatttaggttatggtttaatctataagaaggagataccatttgcatttcatctttatactgaaatattggtgaagaaaaggagtttcaaatggactgtcataaatttaaataaaccatttaaaatattttaactatccttctttaacacattcatcctcaagccttttttttcttcttctttatcactagtgggatggatcttcaattccaaattattggaggaacaagaaagatgataatctagaccacaacataaactatacaataaaatgataaatgtgttatagtcaatgaataaagaataagagagatggtgtgatgtttacacgtttggggcctaaaccaaaaaaaaaggatgggtccaatatgccaactactactattgtattgagagtaggaagagagagaaaccttaatggagacagagggacagtggggttatgtcaattgtcatattattcaaccactcaccaatcactcactccaaatctatatctctctttttacaaataattatgatagatttgatgataagttggttctcaaatcccagccgttcaatttatccagatatgcaagaaaatattagattttaaggaatcggcctttccttatttggtaagactaaatatctctgttcattctagttccaataggtaaaagagtaaccttttttcttacattattaataacttgcattgcacaataacgtattaccctataattcacaatgataatgtgttttgaagtcatctacacacttcaaagtttattactcaatcgaaaattgaaatattgtctaccactcaaatttcttgaaatggttaaaatacttgaacgtgtactatatgcaaaaatctctgatatttaactgctttgaaatttttatcagaatattactagtgatgggtcaatttctttgttaaccttgtgctttatgcacttatgtttatagtctctattttctacacctaaacaacacaatctatttgtaggttgcaactcggacccaaattttttgctaaattttttgttgaagtcttatattaagctaggattgtgacttaaaatatgaataaaactcatattgttggcttaaaaaacgaattaggatgtttgtatttagtaggaacatagtgttatgaaaccacatctgataaacacatgattttaaagtgttttaaaaactattctagcttcaaaaccagtttctcattcatcccgaatctttttttccatcacatatatagtaaattcatgatagaattttaatttaacctaaatatatatagttcatagttggttatgttcaatcgattagaagggttctgttggatccgaattcgagacctaggaactacaccatgatacatttggggaaaatatgatatacgttagtaggtcaaacacaaatattatctaagattagcctccggccagaaaattatggactttgtatgtgagggagattgagaagcgattgctaagattaataaatatggggcttgttggtagagtagatctataaaaggggtgatagagaaacgagtggaaacgcatgaagcacgttataaaattgaataattgaagattcaaccatattctttgataattggtgggcatttttattttattatttgttgtcaaatctctatataaagaaaaaaaattgttttaacgttttcggtttaatgtttgacgcatatatgtgggaacagttttgggcgacgtggtagcttcccctcctcgtttcccccaaaagccaatgcttaaaatgacgagaataccctctccaaaaaaccatgtgctcctaagtcctgaactagttctgattcttttcttttagctatatagggaagtgagacttgcgagggtgagtatgtgacatcaaaatggaaaacactaagctacataaccgttggactaaaatggtaataaaaagaagcagaacagaagtaggtgaataaaactgagaatggaaacaagaaacaactgaagaaatcggatttatatacgtttttgatcatattctttggttcaaactctataaataagtttcttggcttctttcttataagaagaatcgactacactttaagttaaaagaccacaagcaatacacagttacaagaagaaagaaaagtagttccaagtactctctctactttaagttataagatcacaagcaatacatagtatttaataattaacacaagagtcgagcttggactttcttctttcttgggccttcttctattccgattcatcccattgacaaacccaaagcgttggatactcaaatgctcattcgtaaacacgtatcctcattagctttttctttcccattttgcttgaatgtaactaattaatttggttttttttttaattagtaagtgtagtatgtcaatattgtacaactagatgatactgatccattagagtaacactaaagttaccaaagtttcatacaactccaacgacaagcaaggttaggcctttccatccaatattataatctaagaaggagcgattgcccttgatctgacccaacttgcgagtggaaaatctaatgcttatttgttcattcgttttctgagattctatatcaaataatagtcagtcatcactagaaaatgctcaaacaactaatatgattcatacacatttcatatcatatgcttggcaatattggaccgaacttcatgatttttctgtccatgaatgcaaatgtgttgtgatctctgagttacatctcaaaatgtgaacttgacatcatattctcgttcaaaaaaggaagataagacaaaacatttaagaaacatttcacaatcatagggggcaaaagatcaaaatttaaaatttcggacgagagtggaaactatcaatctttaaggggatgatttggcaaaagtgttgtttttatttttcttttactgttttcgttttatcatctttcaacgtctttctctcccgacggccaaaaaccccaattttgccaaatccaattttacacccagaaaccctaattttccttactttgatttgattttgtgatggacgattatacaagagagatgatggatctcaagactttggtcactcgaaccctagagaagaaaggtgtcctcgctaagatccgggtaaattccctctacttctctaccatacattattcgcagaaatttttgagtggaaatgagaacagagaagtgattcgtttgaaatacatacattactctttttctagggttcctgctattcagatcgaaatgctcgatattgttaattgcctatgcatctggaatcttgctgatagtttatttgtgtttgtaggctgagctccgtgcaagtgtgtttgaagcaattgaagaagaggatagagtgatagagaacaatgaaggaccgcctccagctctgttgggaagctgtaatgatcgtgcaaggaagcttcatgcttctccttcaggttttttcttcacaagtttttgcttttatccttttaaatctttcctctatgaatggtttggttctaaatggcatctcttggtttgaaatttttgttgaaatgcaggaaggttactatctgcgttgatttgtgaatacttggactgggcacaacttaatcacacgctcatagtttatcaacctgaaagcaatttggtaatcaatataatcccgttttcttttgctatgtttcattaagaagattgttgatgaatttttctcactaatctggtgaactcctgcaaaacctattcaaagccaaaagattcgtggaagtctgagttacgcgactttaatagcaacaatggttttgagctcaatagaaatggagatagtggaccactccttctcgatgttcttgaagggttcttgaagtttgaggtatttctttctttttttcccctgaagatgtttgcagccaagtgtgaaacagaactttactatctataacttcttctcttagtttacaatctttacaaccatactctaaacaaattacaatagtccacctgtagtatgtgtgatttatgagttgtagtgttaacagttcctattatgtaagtgaagatgatcaatactttacacccaagctttacaaacaccaacttacataaaatcttggtactctgtcctcgcaaccaagagaagaagttatagatagtaaaattcagttttccaagaaaaataaagtctcttagtagagattagagttcttcagagatttgaaaaacacgtttagcaaatttcctagcctcaagttctcttcacatctaagaatcatgtttccatcctatcatagttaaaaccattatcatctgtttttgccgtatgctcctcagatgtagtgatcaacttttttttgtaatgaattttttcttcagagcatgacgcagggcatgggtagtagttcaaggagagattcagaaacagagtcgtcatcaagccttgagtccagaaatcctcctcgcagatcatctgcttctgatagcttacctcctcaacgaaggtacacatatcttcaacttcttattattatgccaaatcaaagatcgttactcttcgacatgattgctttatttaccttcaaataaatgggcaggccggtttctgcatctcaagcatcgggtgagtcatcatttccctagtttcttgaagtattggttgaaatacgtatgcttcattattttttgataccaaataaatatgacaagatgttacagatagaagagccgggttgtctacatctgggtacagaaaagatgaattcaactggagacaaggtaaccaagatacacatgaagaggtaacaagagcttcagcggcgctggaaaatctacagcttgataggaaaactcggaacttaacatcgtcttggaggtaagctttcaaggaagtctcattgaatcccacattgaaatgaaaacaaagcaagttgtggtaaatctgatccatcgggcttgcttgtgttgtaggaatgtgagggatggaacaaatgaagaagaagggagagattgatttaggctttggataaacatttcagcttctggattagtagagtaatggtttgtgtacgtgatatatgtatgtttctcctttatttgcaactgcgttttcaattagccttttttttaacgcacgaacctctgtctccttgagaacaaaaaacatgaaacagtaaaatgttttcttttgagatttgttatgggaagagaagagttcagaaagaagaatcaaagaaagcacaatgtggttgaatattttcattcacttgcttcttattttagtgtctccaaaattattatgtctctagtaataaacaaggtttttgaatgatgtgttcactgtttgttttactcgtactttttttttgttttccctttagtcttctctctctctctcgcttcttcgtttaaaactttaaactaaagtatcgaagaagccaactctggatgacgcaaaagcttctctcagaacggcattgtagaattctccggtgaccaaataatccgattgcattagtagggaatctgttattttgatctgatccgtcaaattggcggtaagaacaatggacgattatacaagagagatgatggatctcaagaccttagtcactcgaaccctagagaagaaaggtgttctcgctaagatccgggtatatttgtttttctcttgccacgattcctctggttctgtgacatacttcattcaaattccgtagagagatttgagtacagagaagaagagaaaacatacattgcttttctagggttcgtgcttccagatctactttatgcatctggaatcatgtgaattcccagtttttgtcgtactttgaaattgagtctgtgaaaaaattgtaccttctcagctgaattggattctttaacatttggtttggagattgaagatttgtttttttttctctatattcttctgctgaaattttagttgtttctgtaggctgaactccgtgcaagtgtgtttgaggcaatcgaagaagaggatagagtgatagagaacaatgaaggactgcctccagctttgttgggaagctgcaatgatcgtgcaaggcagcttcatgcttctccttcaggtctttctcaatttttatccttcatatcttctcttcacttttacccttcagagaccttttctctttgaatggtatggttctaaatggcatgtcttggtttggaaatgctttcttgatacttagatatattcgcttgttcgaaatgtgtctccttgtttttttcgggtgaaactttgcttgcttctattcttaggcgatatgaacattgagattttgtgtagttgagtaggtcatcttgatcactttataaaatgttaaaatgcaggcaggttgctatctgcattgatttgtgaatatttggactgggcgcaattaaatcacacgcttaaagtttatcaaccagaatgcaattcggtaatcaatatatttcattttctttgaacttctgatatttcttttaagtacgttgaagatgaactttctaactgatgctgtgatccctgaaaacctatgcaaaggcaaaagattcttggaagtctgagatacgtgactttagtatcaacaatggttatgagctcaacagaaatgaagatagtagaccgcttcttctggatgttcttgaaggattcttgaagttcgaggtatttcttctgctttctctctgaagatgtttacacatacagtatagcttttttttttttctctgtttacaagctttacaaccatatttgttacacattacaatagtccagctatggtacatgatttcagggcgttaatgtttacagttcctctattctctaagtgaagatgaccaatacctgttggttacatcgaagctttacaattaccaaattagttcaaatcttgttacattgtgctcacgacctcacattttttccaagtaaataaagtgtcttactcaagaaaagaatttttcagagctttgaataagttcggtgaattccaagcctacaattcttgtcacacccagggattatgtttccatcctcttgtagtaaaaccattataatttgtctgctgtattcacctcatatttagtgatcaacatttttcttcagaacatgacgcaggtcatgggtggtagttcaaggagagagtcagaaaccgagtcgtcattaagccttgacaccagaaatcctcctcgcagatcatctgcttctgatagcttacctcatcaacgacggtaaatccaactccatgttctaccaaatcaacgatctttaatcttccatgttgcttatgagtctgacatgcttaattaatgggcaggtcggtttctgcatctcaagcatcgggagccgctacctcagggtacagaaaagacgagagcaattggagatatgacactgaagatatgccggaagaagtcatgagagcctcaacagcacttgaaaatcttcagctagacaggaaaactcggaacctaacatcgtcttggaggtaacttggagcgtcatggctcttaccttacaagtcggatagaactgaaaaataatctaatccattggttttggttgtggttcaggaatgtgaaggatggaacaagtgaagaagaagaagggaaagattgataaggctttcgttaaaatccagcttgtgaattagtatctctacatatatatgtgtgtttcttttttcatgtatggttttaaatgttgcaactttgtttcttaagtttttcgtttgtcgtgtttgagaaatccgattggaagtaaagattattgatataagatgtcaactacaattaagccgttaacacaaactcaaaaactttcataaaaattctcaaatattagtgtcattaaaaaagcattgttaatctgaggactgtatacattccaaagaattatcatttcccaaatttatttaaaataattttatgatatctaatcctaaatctttttgttgaggaaaaaaaacaaaaaaacaagtaaaccttgtttaggtttattagggttttaaaagtatttatatttgttttctgctgcagcagactcaaaaagctaagtaaactactcaagtccctcccttttccggcgtcgctattctcagtctcattctgtctcccgtaagtcctaactaagctttctctcttcagtcttcagcctccgcccgttattgttgacaagttttagcctttttgttaattactactttactactcttgttgtgaatttgctgctactgttgaagccatggaagctcggattttgcagtcttcttcttcctgttattcgtctctttacgctgtcaatcgatcccggttctcttctgtgtcatctccgaaacctttctccgtcagctttgctcagacgacgagaacaaggactcgtgtattatccatgtcgaagaaagatggtcgcactgataaagatgatgacactgatagtctcaattacaaagattctggtgttgatatcgatgctggtgctgagcttgttaaacgaatcgcaaagatggctcctggaattggtggatttggtggtctctttccattaggtatatatatatatatggaaaactgcaaaattttcacctgaatgttgaaacttttggtcttctaatgaatgagtgtgtgtgagcaggtgatagttatcttgtagctggtacggatggtgtagggactaaattgaaattggcatttgaaactggaattcatgacaccattggaatcgacttggtatagcaaattctcttttgtgtgttttgtgatactagcccataaactcatggtttagcttattgttataggttgctatgagtgtgaatgatattattacttctggtgcaaagcctctgtttttccttgattactttgctactagtcgtcttgatgtagaccttgctgaaaaggtaccattgcttcatcatctctttccccttttgaatttgagattgctttaaggacttgatattgatgtatgctttgttgtcaggtcattaaagggattgttgaaggttgtcggcaatcggaatgtgctctcttagggggagaggtatgtgttacggttttgacaatgtagtttacgcatctttccatgattgtgtatcaatttggttttgttttgttttttttagactgcagagatgcctgacttttatgcagagggcgagtacgatctaagtgggtttgcagtaggcatagtaaagaaaacttcagttatcaacggaaaaaacattgtggccggtgatgttcttattggcctcccgtctagtggtgttcattccaatggtttttctctagtaagaaggtaaagagttagcgatagtcgaggttttaagcttctgatttcatggcttttaaccacattccaattgttgcagggtattggctcgaagcaatctttcgctgaaggatgcgcttccaggtggatcaagtacccttggtgatgctctaatggcacccactgtcatttacgtgaaacaggttggttttcttgtcaacaaatattcattccatcatcacatttgtaacaactctatgactttctctctctctgttattcgaaggtacttgatatgatagaaaaaggaggagtgaaaggtttagctcatatcacaggcggaggtttcacagacaacattccccgagtcttcccggacggtttgggtgctgttattcacaccgatgcttgggaacttccaccgttgttcaagtggattcaacaggtaatgaatgaggagagaatcataaacagaacgattacgtttatacttctagaatgtttgattgttttttggtttattgtatagactgggagaatagaagacagtgagatgagaaggacgtttaacctggggatagggatggttatggtggttagtccagaggcagcttcacgaatactagaagaagtcaagaatggagactatgttgcgtatcgcgtaggagaggttgtcaacggtgaaggcgtaagctatcagtagagtgttgtgtgttcttttttcttctgtgtttttttaagttttcgtttcccaccgtttttaagaattaatccatttgtctacggttttatgaggttacaatcgagatgaggcattttttaagacgtcgtgttattatttgatctaattttttaaaaacaaccaatgtgattggtctggtttattctctttgtcgcacaaacagatgttgaaagatattctcgttctaattatataaaatttaaacatgttgtttgcctagatggtatgggttaagaagctaattgtcaagaaaaaacaaatgttgtaggaagaattcttcataaaattcatatattataaaactgagggtatccaagagaatcatttacttactagcttagagattaatgaactatatacaccatttatgtcttgtatgtatcccatcaccttaaaatgaatatatttatagcagcataccacaaacaaacaaatgaatgtatttaaaagttctcccaaaattcaatccggaattatgaaaaaagggtgactgagagaactgagaagctattgagactacacgtaggacgatttagctactacgatttgaagatggaagtggaaaagagagcttcaaggttgattatacctaggaaatgtcttggaccttagtttccgttggttcagagttagtctcttttgcctctgttgatgattgcttctcgtcattaacatgctccggagatttttcaggtgttgtgttctgcaaattgcgggtcagtttgtatacataactaggagaaactatttggttttaaagacaattttgaggtgtttcttgggtgaagccgtctctatatatgttttgtgtaagaagaagatttaccttgttcttgtcgcgccaccctagtccaaatggccgtgctagcaaactgatcctgcttggaggaggttctggtgacgaatcttggttaacttgcctggaaggttaaaaaaatatgtatatatatacccaattcagaatacacaagggtgggtcattagtcataacccaattgagtgtttatagttgtgtacacaatttatgttttgagttgactcaggtaaaaagaacacaccgtggtgaaggttgtgctttgagttggccagattgatactgcaaagttgcctcgagcatggactctgccatcactgctctcttctccatttcagccagtgcagcaacagcttcctcgtatttttcctagaccagttatcatattcgttacagaaacgatctaagatagaacaggagaatacaaaaaaaggaaaaggatataaagttgcattcaaatcacgcagctctgaaatacagacaagggttaatacaggatttacagagattatggtcctaaactaatgtgtaactctactccatggaaggcgagtaacgacctataacaagaggcagttaaagctcttttaaacttaatagcctagccacatctgtgttaggagtcagatcaaactttttacctgcaagacttgagcagcatatctctgcgcttctgcatcctgctcagcaaatattcgtgcatcttctgttaccttctgttcttgctccacccgcatcaagaccttcatacatatcaattaatctcagaatctttctcagtcacaaacgaaaaaagaagaagaacagattgatcatgcatatgcaaacctgtagcattgcaccttcttgttcctgcttatcagagaggagtctctgaacttcggccatttcttgctctaactgttcgacctgaagttcacattcatgacaagtagcatttcacatctcaagactatctcaaaactaacttagcaccaatgagccttcaaattggatcagcacagagatgcgtgacgaggaaccagcaggagaagaaaagagagagaaaggaaagtaatgatggtaaaagtgacatagaaaatagtcttcgtattcagaacataaataaagagacaagtaacataatgcgagcttataggcttatttggaaaattaactgtcaagtggcaagcttcattggaataccttggcactcaattgacgccgattgtcttcctttactatctccatgagagcaatctccaattcttcagctctaccacaaaatcagaagtttgggagacattacatattgaggtatgataaggaaagatataaaacttctaccatttagtgccagttttaggttgagaaaagaaactaacctaagtagagctgatcgtttctcctcaagcaacttgcagagttcagccttcaaccacagaacctgaaaaagttgtcagtcaactttcagagggggtttcatgactgtaggtatcaagtgattttttctaccgttcaccagacataatcatccaccattcaagcgtactaagggcgtagaggagtatcttcaagccaacaagaaggacaaaaattacctgcgcttgaagatcttgaacagaatctacctccccatccccagttaggctaaccaacacttcatctgcattacttgatcctgactcagatcgagacaaactcccatttgacaatgaggctttgctatccaccaaaacagattttgggtcttgcttaaaattatataatttggaggcaagtcccttagaatctctccacgcttgaagcccctttgacctttcctcaagtgcagcgatcacagctggcctatgcttgcttcgcaattcttgcaatctaatttcatgtacattttggtaacccatgcaagcagttaaaactagctggctgctatcaaatgttgatccagtcagtgattgtagcaaagtaacagcgtctccagcatccttcgtagtaactaatgcaggacctgaagtgaattaaaccataagttagagcagtctcgatgatgacgccactgcgttcagaaggtccacaaaccatctcacttaaattgaaagaccagcagtttcaatcaagtaccatatagttccatcaatgcgagtgctgttctgaaaagcataacacgagttccttcaaagagaagcacatcccagactctaagaactgtgatcaagaagacgaacatttagaaagaaaatgggttctcagtcccaaatctcaaagagaaagatgatcaaattttaacagattgccagcataatttactagttactcaattctatttcaaacaagacagctttaattccaatgtttaaaacctgaccactttcccatggaagcatattcatgaagatggaaagaaaccatggccctgtaacccaagccacttgcactccaagataatccagatgatgaactgtagacatagaaaagttgcagagcttagtactaactgtgaacattctacaagatgaaacaaaaaactttgagggaactcacccaatttaggaaatctttctcgaactaactcctccagaactagttgatcaacctaaaatatgaaggtacatgttgtcatgatgctatcaccagtcagcccaaaatttttgcaaatgtatagaaaggcaactaatattatcacctgagactctatcatttcttctgaataataaccattgaagtagtcatcaatgagtcctatcagtgccctaaaaatcacaagtatttaattagaaggggcatcagtttagaaagaaaaaaggagaagatataaggatgcttaataacagtttgatcaaccatgagaatatgaaagtgatagatattaaaactaaacacagagcaaggagttcatgtttagacagaaaaataagattaggaatgaaaaaagtagattaatcaaacaacattggttaaattagaaataaggatacagagaatgacccaagaacagttaatgtttggaagaaggaaggcgatataacacaaactaaacagtaaacacagatcaaaagagttcgattttcacaggaaataatattaggacttggagatgataaattcatcaaatttgtgaacataccaaaaggcattttcttctggcatcaaaagcaataaaagcgcagcaaagaaattcatagcctgcagaaagtatattgacaaaagatattaacttgatattaatgttaatttactatgtctcggtactaaaatagaggtactacaataaagatcatgatattggttaagaacaaatacctgacagtatcctacagaaggattatgcctagcataagcagtaagcaaacgccgtagagcatttctaccatcatcatctagagcaggatgaccaggaaatgtccgaggtaagtcctgtactttaaacaagcaacggcataagaatcctgatcaacttcagcataagccacgctgcatcactacatagagagggtcaaggctgaataaattttgagtactaccttttctatctgtcctttccatttttccacaacagcaatagattctgtacttgaacctttatcatcaacatgctgcatatcctcttgctctatggtgtttacagaaccatctgctgcaagaaggttttgataataatccttgcatcgtcgtttcctcacgcccacgaatgcttgccataactgaaatgttattgataaatgtgacgattataattgagcaagagctaagactaacgaactatagtatggagagctagagcatgatatcacataggaatgtaaacatgagaagatttattacctctcccctcagagccataggtacaccgccgcgaatcagcacttcaagttcttccttccaaggacatgtagacagtggacttgcatcagcagcaacagggataccagagacacctgtaccatctgaagaagaaccatcctgaacatcggacctctcaacatcatagaactcgtcttcagaatcaatatcagatgctcccttggaagatttggcatcatcaaatgaaggtgaaatcttcaccttcggagcctcttgctcgctttttgataaatcccccttcttcttgacacggatgctcatcaagtcttcaattgatcgtaaagacggtctgatctcagtccataattgcactctgtgaacattcttctctgcatcggggtgtccttcttcttcactggcattatcaggagttacatcagaacctaacttgtcagtatgcagatcttcaccaggccccttgtttaattctttttctttttccttctcactttcactaaacggtgcgtgaatattttcagaagatccgtttgtaggtaactcagtcgattcaacatgatcttccaagaaactgctccacctgtccgacctttcttcttcttcttcctaattgaaagcaaagagtgacatcacaagtttagggacttaatcaggaaataatgatgggatcaatttctaccattccaagaaccaaaaagaacttattataagctatagtttagtctagttttgatatctttcacacaggatttccctatgactacgattctaaatggaatcaggattctcacaatatcacaacggtcataaccaaattagagggaaatcaagctgttccaatgaatcatgcggatgaaaaatctgagtagaaaaagtgagatttatggataaagaaccttgtaaatatcagcatattctctgtatctctgcacatgttgaggtctgacaggaaatccgtatgcatccctgttgacaaagaaaaaaggcgatatgagttcccacgatatattaaaagcccatccagagctcagacgaaaccttactatatccaatgacaaaattgcatctctcatcagtttgttttcaagaaattgaacaacagaaacaactcgaatttgctatcaaagactaccttcactaacgattatgccacattgagaacaatagtcaccactggacaaaaatcagcattcaaatccaaatcactaggatgtacttcaaatcaagaccaataatcatcaaaatcccaactaaattgttaagaaaatgcaaaattacgctaacaacaagacggattaaaactctcgtaatcggagatacaacatttcgctcagcgagtctagcaaaaagctaaagagagaagaagcgcaagttcaaaccaaaaaagaggaagcagaaatgtacaggggaaagggggaaaaacgcgaaacctcttgtgctcaaaggcgacgagaggattagaaggcttagaagcagcagcagcagcagcggcggcggcggcaacgctcctcattcgttagcgtgaaaaagagatctaaccggtgaagagttggtgagaggacgaagaagaagatccaaatctctacgctagttcatcattacccgaatgaagttgaagcaggaggaggaagttgcagtagagagagagaggaagtggagaaatcacatggaaagggcgagattgtcgaccaaggtttattacatgtgtgactctctctctctctctctctctctctctctctctctattttgactgcgtttcgattccttgacactgagtccaaaaggtctctttcatctttctctcatttttgtatatcttttttactcctatctttttaactacttactgattttgtatgtaaatgtgaatttcacagttgtcttccaatattttgctatgtcaattttatcttcagataatttgattgagttaattatcttatttgtaagaccaaaatgacaatttgatgaaagaaaaatcatatccttatatctaatttttgtgtggttgtgcgagtctatatcaacctactttgaaagatagacaaagttgttattagatatgggattaaggacatctacgtcatgtatcatccttataagattcagtttaaagtacgaacgttattaatttgatgtatgtgtaacaagcgtgaacgtatggtttaccataccgtattcaatttgtagcgcgaccatggttggtctttaattattaacctcaaatagtcgaacttcaaaaaaaaactaaacacatttaccaaaatctttgattgatgagattcatttttaaccctaaaaagatagatatgcaagaaaataattgtggggattgtaatggttgtcgatttgtcggtaaaggaccaattgctttaggagttggtaaaggacttttctagggaattaaatatgtctttaatttttttttatttttttttaataagtttttcttagattcgctaaatccataatctaagtattcaccatattaaatttaatcaagtgggaaatttctatcatatattaattagaattcttattttagttactaattgtttgactctaatagaactttcatatatgtagttaatagtctcactcttttttcctttcaatcacacttggcaaacttaagagaggtttacataattgtgttaagagttttaggtgcaaaatcaatagaagatgaaacaaatatgaaaatccagatttgagaaattatgaagaatatccaccaatggctagttgaatatatacacagttataactttagtcaattcaatggtttaaatattataatctactatttcgtgtactgtatatttatttacctatatacgtacgtgtataatttggagttttgtttaggggctagtaaggagcttaaattcttgtttctataatactctcacgttctcaaacacttgtttacaaaaccaaatattcgtcggtttgggtaaaccaacacaaatgattatatggttgttcattatcacaatgattatcttccaaatgtgcaccaagtttttgttagtgttttagattcaatcatggaagtatggaaccacaaacgtacgtaagaggaagagtgcagcacataatagaaaagagcaatggccaaagaaggcattacaacgaaatgagacttgggatttgacacacatcaactcatgcaaaaggttgtaggtagcgaatgggtgttgaagattaactatcaaagtgatgactccatcgaacaatataagttgagattagtagctatatgatatattttttttggtgggaagtagctatatgatattgattcatgcaaacatacaacgaagatattagttttacatttttaacaaatatataaaatcaaaatcagctaagaattaaagagaaggcccaaaacgtgccatttgcttcattatcaatcgtccatatcaatccaaagtcgacgattatcggcgcacgttacgcacccggctcgcttattttcatagttagcgcacgttagcatctctcccaagctgcattattattggccgttgtgtgactcccataaaggcttagggttccggattcaggtcggtgtcgccaccgcccttcttcgtgcttctcttccttctttgtcggatcgtcaggtttacagatcagctcttgtggaggatatgggtgaagaagacaccgcgacggtggatcagaacagtttcggtggtggcaaagattcattgcttcgtaatcgtcattcgtcgccattgccttcaccgacacagctttcttctaaagtgattacattgcctaccgtattaacccttggccgtgtagctgccgttccgattctcgtcgccagtaagtttacttttttcgactctgaattctggttggagtcattgtacttgttcggtgtgtgataggagtctaatcatcagatctaaacgaagatgcaattgcgatttttccagatcagagttttgttggtttgaattcgagaaattcgacaacttttttgaaattgagcttattgctatgtgtacttcacttgttaccactcttcaaatttaatctgaattggatcttttgatgttcaattcctgattttgattgttttatctcccattgcattatcttcatcatctcctttggtttttgaaatgtagccttttacgttgattgctggtggggaagaactgctacgacaagtattttcattgcagcagccattacagattggcttgatggatatattgcacggaaggtaacttctttctttaccctttcatgttcttctgcatagttgaaattgtaagcttttaacagtgagacgtgccttttcagatgagattgggttctgaatttggtgcatttttggatccagtggcagataaggtcagataccttcttccttagctacctctatcctctttatcttttctccaccagaaaggaatgatttttatcattctgatttatgtcattggtatgcgcttatggtagcagctacattgatattgttgtgcactaaaccaatggtcgccgttgtcttaggaccagttccatggttagtgacagtaccttcaatcgccatcattggtagagaggtaagatacagaattctgatataccgttaagtaagtttcacttatcagctttctgttctaaactagtcggtatacttttcactgtagattactatgtctgcagtaagagaatgggctgcatctcaaaacggcaagctttcagaggtaaagttatcaccatcatgtgcgttctcttggatctgttttcgtaagtgttcctttcctaatccatggaaatggcattgatgttgctaggctgttgctgtaaatagcttgggaaagtggaaaactgcaacgcagatgatagcgctaaccatacttcttgcaagccgggatagcagttttgagagactattaccgtcgggtattgggttgctctatgtatctgcagggctctctatatggtctttagttgtttatatgaggaagatatggagagtactgctaaagaagtagcaacaaaaaactcttttttcgggctttttgcattcagtatatacacatagaatggaagatttacctctcttcttcttgaagaaagctgactaatttctctctggatacaaatgaaattagttgggcaagcactataagactcttatatgatgctttagttctgttttcaactttgggcactggggtcgtactctacttggtttggttttgtataatatctctgaatcacattgctccggctagcaccgaattttaatgaagcagcaagcacgatcttatgggcaatgatggaaaagcagcaggcgcaatttcgttctagtcgaagacttggtctcatgaattctgatataaatgaaaacaattgttgcatgtcatgtagatgcttttaccgatacaatataatttatatatataaaaaactttggttacaatatctcttcccatttgatccttctaaacccttgtaaatggagatatccggagaaccatctggttagagacgtgcttctgcttggactcgtctcttgtatctttcaacaagctcttgtggatcttgacgggtttcggtgtaagcttcgattttgttcatctcctgcataaaagcaaagaaccagagattagcatgtgtatggggaatatttagccttagaatgaaaggtagttacaaatgtctaggtaatagcttaacctgaatccaaagggcaaggttaggccgaccagatgtaatatcgacgttcatcacatcacttaagataagccgaaatctctctatgaaaggagcatatgcaacatcaacctatagaaataaacaccattttttttctcagcagcaagagttgatatgggtatggcaaattgaatatagaaatataatcgacaataccaaactaaattgaccaagaaagaaaggcccttcattgaatttggaaagagcctgctcgatgtaatcaaatgcaacatctgaaaaaatgaaagacaagattcatacacatgccaacataatgtatctgcaaacacagaagtaagataacaacttcatcttctaatcacctgctgcattagtgtcagtgccgtttaatgtggatcttacagccttggagaaggagtcagtgtaagagagtaactcatcagctacaacttgcttctctaaaccctgttattattccatccatggatatctctcttctaagtataggttcacttaatgtgttaaaattgagctcaataaatcaaagatgtcatagatactcacatcgggtgtaagcgaaggcccttcaaaattagtgtcaatgtacttaatcagatcaaggctctctcccaatactcggttattgtgctctaatgcaggcacctgcatataacagagaacaaaagccataaaactctaaatcctttcacacatatatatgcattaaaatagaaaagttcacaccttgttagccgagtaaactttctccttataccaagcaggcctgtttttaagatcgatcggtacaagttctatcttgttttgcagaccctacacaaacaagcaacataaagaaattgatatagatatatagaaacatcgataagaagaatgattcaaatttgaaaccttgtagttgcgagcaatccacgcacgctgagcaaatgggcaagtgtaagatatgtacaaccttaaaatcacacaaaccaaaagttgttcatcaacaacttctctaatatctatccagacatgaaacaaataaaaaaagcatttttagaaaaccgaaaccttgttgatccatcgaatacttgaactggttctgaagaagaatcaagctccggtactcgactgcaaaatagtaacctttcaatacacaactaaacttgtaatcactcttcatagaaggaaaaacatatttgattgattaccttgactctacaacagccaatattggttcggttcttcgggatttacaccaccgtctcccggagcctggtcggagaattttccgatcaagatagagagaagatgatgaggaagagagagagacatctctcgaggataacgcaagcgttggatgtaagaacgcgctaactttcagtcccacactcatacctcacagctttcactttctcagctcctgaaaggattttccgggaaaatggtttccactgaacctttttgtttgactgccacaacttccggtttggttcaattcggatagaataagattctatttcggtttaaattcggtataagagtaaaattcggttcaaattcagattgatgaatgttggttcgattctgtttcactatttcgtaaacagaaagtacaattgagatttgaggaaaaaagagaggaaatttacacttttcgatcagaaaataattaaagaagtaagattttcacacaattttgtaacaaaagaagcaaacaaaatcaaattctggttcaaataaggagaaaaaaaatgatctataaaacgggattatgggctgagaggagaccacctcctttgacagagatcggagttcgagtagcgaagtttgtagcgtggaggaagacaacaataacggtaatatcgtcgtgaaagtgtcgccgaatgccacgttctatcttctccaaatcagaatacctcatctctctcttctttgctgcttcttgtaatgcagctttcactaacttccgagccacaccctgaaagaatcaacaagacaccacaaattcaacaaacaacaaaaccaattcaaaccagacaaaaaaacaagacaagaagagtgttgtgatatgtcttacattgcgtggacaagaattgacaatatcaacagcttcctggttgcttagatgctcccataaaccatccgaggcaaatataagaaactgatcttccggatgaatcttatgaactgttatagtcggttccgctctcatgatcggcttttcaaaacgttctggaaccctaaacttaggtagtagcggttcttgattaaactccgctcttttaaggtatgcgtcaccaatggatcttgagacctgtataatccctttaacacgccaaactttgtgtttcaagaccacgatattcggatcatcaggatgcaacaaacgtaactcctctctcacagattcgatacttgcattatgctctgttgataactgaacagctttcaactctttaaacggatttgcgactttccctaacacaacccgagaatctcctgcgtttgcaacatacaacaatccattacaaacaataccaaccaaacaacaagctcccacagaagcaatctgtggcttggtcttccattgctcctgcactaaaccgagaaactcctcctctgttgctacaaaccctctggtgataacatcaggcgacatccctcgctgttctgatgtgtacctcttgatgttataaaagagcctatcgtttacaaaccgagcagcctcgggacctccatgaccatcataaacaccaacaaaagttgcctcaggtccagactcatgcaaactaataggaccagattctaactggctatgatcttcaagaaggttgttagcttgaacgactgccatagaaaactctccagtgatgtggttcccagaatctttgtaccacaagagaccatcgagacggccattcgtatcatcactaccaggactagaatcttctccaataccaaaaggtctccaacaaggcgatacaattctcctaaatgttgtagataccataattcacatgtctcaaccaaaagaaccagctatcaaatcgttcatcaaatcagtgcttataactatattatgaagaaacccaatcttcttgtcagactcaattccaactccacaaacccaggattcagaattcaaacacgcattcacaaatgtaaacaacattaatctgcattccacacaaacaaaaacaaaacatttagtaatctagaatcgaaaaaaggataaagtctccaaattttcaacataggaaactaaattttttaacttttaacccatcaatctgataacaagcatctgggagaaacaaattttgattaagaagaaaactttacataactccatccacatatgaatctaaaggtttcaactttgacccatcaacctgattgggtaattgatttgaaatacctgatgaaatcgaggattagatgaaagaaatagggttccttatttcaaaagcttggagtagaataataatccatcattcgatttcagatcaatgagggggaaagattagcaagatgattactaatacaaatcaaaacctataaaaagcgaaagagacgatgaaagagggttaaaatagagaagaagacgcgtttgaagaagagacggagacgttggatttgttttttttagagagagaaagtaccgatagtcgcggtcatcgtgtttatggtgtttttttttttctggtaaatttatagtattttattttctctacctgtcgtctctccatttctttttgactttaacggtttgactttttttttgcaacatttaatacctctactatttttatgaaatattctctaaaatatggtaccaatttgttactacaagtgtaggaaaaaaaataatataagactagctttgtcaaacttattgagaaaaagaatgactaactatagtgaaaagtgatcatatatttagtgaaaaaagtaaaaataccaagtctatatatatatatatatatatatttatgtaagatagtatatatataaaattattgctagtctctttttgaactaatggcttatgaagatttattgaatagaattgagtcaaatgacaaactttctttaccataaacttcaccactaagtttataagcccatttttaagtacaaatctgaaactagagagaatccagctttgagataagcaatccaaaagaagaaaagtaaaaataaaagaagaaacaatcatatctataagccccaaagaatgacccatcgtctaagaaacaatgataaagaaaaacccttataccaagaaatcaggacttgagaggagattcagatgcttgcttccgattgtgtcttgtagtattgtgatctctccttctttctctaataccttctcctccaatttctctaccattcctttcaatgtctcgttctctgagttcaaaagcatgtttttctcaccgtattgtttatactcactccatatctggcctctttcattagacacttttgacaatagtgcgttcagcctcgccatttctttcgccgcttcctggagattgctttcgagccgtcttatgctttcctccttcttcaacatctgatgtcaaaaaagattagcgtaaagttaacattttataaatgggaatagtttctttatatacaaaaacagacatgggatatgtgttattcttgttttgcaatacctgatgcttgaggtctttcagttcgtgggttgtaactgataggttgtctaaactgctttggacctcacatctcagaatctcattacctcgtactgctgctgctagttctgcttggagctgttcgatttccttttccttggaatacagtttctcccgcactaaacttgtgattagggtctcagcactcagttctgctcgcaagttttcctacatgagattgggccaggtatacattagccacatattagtgtaaagcaaaacaggacatacaagaaaatacaatagagatattaagaaatggacatatccgtggacttacttcaactgattggtttctttgttccctaggcctaccagtatttgaggaagacgattctgaattcgaagctaccacactggtcaccgtttgcaaactcctcttcaggttttcagttccgcgccttatcccatggactttcatttcagactcaatcataaactgctcacttaatccgtccttcactgaattcttatcctgataggtttcaggaagctgagttaatttccctttgatgaacttcagtaacttgtaacacagctggctgctctcatttaacattgacagtccctgttcttgcaagtagcagacacgcatcttcaactcattctctagcttaagggttgtaatgtctatttcttgaccattccctttcaatcgattcagtagacagatattttcatggcgaagagagtcagtttcaagcttcattgattctacttcccttctaagtgaaagctcgatccctgtcaaccttacctgctcgacctgcaatttcttgaccaactggtctaatttctctgacggttgcttcttaacctcctcagaaacaccatctcgaagtccctcaattgtcttcccttgttctttgcaagttctgaaaaactttgtaacagatttgtgcaactccctgcattcttgatccttctcttcaaagtttcttctcaagaaatcaagatcttctgtagcacctgcgtaactctcttgtaacttggagagagtttgtttaacataattgttctcttcatgcaatttatctgctgttgtggtcagctcagcaactcttctctccaaatgtgttatcatgtctttgttctctgtctcattttcgtggaaagcagatagttctctctggagtgagacattatgctcagcaagctctcttacacgctctcggagcttcttctcttcaagctggaatttttcgagttttgacgtccactcacctgatcttctatcaagctctttctccaatccagcctgcagctcgctcttctccttttctagtctctgtatatgcaagtcccaatctgacttcaaccatctgatttcttccctagcagaagccctctcaactatttgggaccgtaagagatttacattctcaaatgccaagtggagcctctcatcttccagttttctaattgccccaaccaaagatgaaacatcgaagtcacagtctgaaaggcatctctgctgctccaattctgcagaaaacaatttagctctcttctcagcttctttaattttcatttctagctcggagtcaagatcgtcttccatacacttgtacacgttcctactccgtatacaattttgctggtgccctccatagtcctgcgtataatactcgttaacaggttcataatgttcagctagtgaaacattagcggcgatatctgagctcgagtcaaaagttctgttaagggatccaccatagacatcttgaattgtgattggttcgtggtttgaaccctttgacttgccatgagtctgagagagtctttcaatgacatttctagcaaccgaacgaggcgatccatgccgcaacccattatccacacaatcagcagaagagtaacgtaaatgggtgcctttagcttctctaaatgactgggactttcgtttctcatcgaaagtgtctgatggtgatgtagggactgtccattgaactcggggtggaagcctccttcgatttatactctcagaaacaccactgtgtgaagaattactcttttgcttgcacggttccaaatgctcttctccatcaatataacggtccagaactttactagagacattactcgaacaagatgatgaactcccagacgaatcatgctgaaacttgtctgctttacactgcctttctctaacttgtctttctggagtaaagcatctggtacacagtattcattacattgtttgtcagtggtttaatcaaatatagaaccaagatagcgaaaacattacagaaaatcatcaaaacaatctcataagaatgaagaaaggccaaaagcataccgagatgaatgattgcgccgcctatccttgcttttagtagcactagttgttagttcattcttggaagtttctccaaacttgtcaaaaaggaaacctgcagaggaccatgaaaggcttcgtctaagagctagaccaccagaaacttgaccatgtgacttaggactatcgaactcttgttcagcctgactactagcttgggttctcatcttactatccgcttctttttcgcagttaacttgtttatcatttccattaccagaagatctgaaaaagaagagctttttcattgttttctccaatcaaaaggtgctataacaactgcagctgcaatcaaaacatatagaagcaaatcaatagattgtaagatatctcctgcactaaactaggaaaagttcacattttgcagcaaattagttcatgtcaatctccaaaaaaagtgctccaagtgaatcttacaaacaatttgctcgatgaaagataaaccagttcaacaaaagaaatgagaaaaaacagcataaatgatcttagactcgagataatcaactataactctactcagagattcagaaactcaagacttatcatagtaaacatcgagccaaggcctaaaataaaagaccagactaccctaagcatcttcaaagctacgataaaccctagagactaatcaaatcacaaatcgaacctaaatcctacttgcggagaagttgatgaagattatgttcggcgagattactcgaacactaacaaaatctagaaaggctctctctttaaacgatctcaatcgatttcgtcgccagaaaatccaactctactctctctactctcttctaatagttggaaaattgaaagaaaaaggaaaaaaaaacactgagaggcgacagctttttatgacgacacaattggctttaaagaaaaccaaagaaacacagagaaaaattttaaaatttcaaaagggaagatctttagaatttatgaacataccataaaacagcgattttgcaaatcgaaaattcgaatggagaagaaactgaaacgcagatttaataacagcgctagataacgtggatttgatctaaagggagaagtgcaagaagtgtgagagtgtctcgttgacgacgaagaatccaaaagaacaaaacggctccaaaaatctttattggcggtgtgataatgtaaatagagtatccagtgaagggtatttctggtaacctttttaaatctttcattgcgcggcggatagagccatttggacttttggaggagcggggctacaattatttgtttttcactaacaacacataacagtgatcaataacaacattggaaaaacttgtaaattacaaattaaatgtagggtatttagttgttttaagataagtataataaaatatataggtttgagtgatatgaggtaattatgatacagttttgaagtgataacgataagaattgttggtatgataccgtttttgttgttgataagctttgagaccgggaaggtgtatgtataccaccatacctaatactataaattaccaactacgctcataatcaattatataattataaatttggtataaaagtcgagaaatctaacaaaaatgataaggttatttctcaatttactttcatgctttatttttcttctttatgtttggcaatagcacctagtatttaaacaatacatatagtatttcgacacatagttgcccgtaataaattgaaataatataaaagagaagtaatgcgttattttagatagaaatctgacatcatatatttataattatattttctataaataaaatattatctatatatagtttttttacacttggaattatatattgaccacacatcatgtgttaaattttttttttttttttttttttgcattgatactttggccatattttagttttactcataacatattaggtataatcacgatcagtcctaatattttgaaagcccaaaaaaaaaaagactttattttgagatattttttcacaaggtaaatttaatttcagtaaaaaaagggtttttaataattaaaaatatctgtatattaatattttgtatagactagttatatattaatcaaaaattgggaatcctagactatttttgtttcatcaactggacctggtactggatcaaacgttgctgcaaactaaaatgacaaagcccaaaaatcaaaacatactctcggttagggattagatcagaccggacggtttcctaccttttcaaacgctgtcgttttgaactatagagtaccacaaaccaacgacgccgtttcacttggcactatttatttcttctgtagttttttttcttctcatacatatatcaatcaatcaagatcaccaccacaaggcaaaatctaaactctctctgcaaaatttctgctaacttcttcctcccattttcttgccatggaaatcgattccgccaccaacggaaactctgacaccgtcatgacggaatccgccgctacgatcactccgtcgccggtcgtcgtctcgtcttcgagatcgaatcaatttacggaatctctcaagcttgagcaccagctcctccgcgttcctttcgagcattacaagaagacgatccgtaccaatcaccgttctttcgagaaagaggtctcaaccattgttaacggcgtcggagaattggctgattccgattggtctaaagacgataccgtttcgcgtcttacttgccttgttactcgattacaaggcctcaaacgaaaggttgatttttccgtctctctccctctgtgatcggtgttttaaattatgtagacgaaactgaatcaattaatttagcgattaaagtttctgattttgctaaatgatatccacttatctgtaaaaaatttgatcttcgatgttgaagatcaaagtaaagtatctgtctttggcaattatgtctcactagacattggatctcgatgaattcaatgtagtggtggagttggttcattggaacttcccatctgactatttgcattgtcttctaaatttttatcatttgggatagtttctatatcttctggagtaacatcacatggatatggcctggcttacgtatttttttggttttgtatctcagttggaagaagggagcaatgtggagaatttgcaagcccagagatgtcgtgctcgcatcgatcatttggattcagtagatgtggaaaatattactgaatggaataataccaaactgaaacggattcttgtagactacatgctgcggatgtcatatttcgagactgctacaaagctttcggaaagcagcaatattatggtttctctcatcctcttgacactcattatatcacactattatgctatattgctgtcttggttaatatatcagaacatattctttgctgtttcgtttttacaagcagtgaaacagatttgttgatttgtactgcatctctatgaaatgctaattataaatatctcatcttttcaggaccttgtcgacattgacatatttcgagaagctaagaaggtgattgatgcccttaaaaatagggaggtagcttctgcattgacatggtgtgctgataacaaaacgcggttgaaaaagtcaaaggtacgtgctctatgtactctcatggttaagttttactttcattttttatgaactccatgtggtttggctaaagtatccaattttttaccagaactctatgtataattgttcattgctaattatatattttccttttcataacagagcaaatttgagttccaactaaggctgcaagaattcatcgagttggtacgagttgatacagctgagagctacaaaaaagcaatccagtatgctcgaaagcatctggcatcatggggaacaacccatatgaaagaattgcagcatgttctggccactttggcttttaaaagtaccacagaatgctcaaaatataaggtgaagttttccttcttttgattatataactgttgaaaattgacgcttcaacttgtatcttttcctaatgattgattttgtctgaaatggcccaaaaacgtggatatagatttcactgtttctttcatacaccaggctgcttcagtaatctttttcgtctttgtttattgccgaattagttgtgttactttcaactcttgtcgaatcttaattgatcattgcatgtatttaggctaatcaactaacagatatgtttttcttttttctcaggttttgtttgaactacgacagtgggatgttttagttgatcagtttaaacaagaattttgcaagttatatggcatgacgatggaacccttattgaacatctacttacaggcaggcttgtctgcgctgaaaactccgtaacgatcaaactctatcaaaattgatgtttttgattgtctattttctgcatctgataaaggggcagaaagtaagttttcgaaatgacaccctaatgtgattcttactggtgggttgcgtttgtaccttgatatgactcagatatggtttagaagaaggttgtaccaaagaggaccctctctcacaagagaactttcggaagctagctttgcctttaccgttctccaagcagcaccattcaaagcttgtttgctatatttctaaggagctaatggacacagagaacccaccacaggtgctgcccaatggctacgtctacagcaccaaggtttgattctgttcttgtacaacttcagcttctctgttctttttctctttttagaatctttttctattagcttgatcagttacatcagtctatcctatacagttcaaaaaatttaaagttgggttactttttttatttatttgatgggtaaatgaacttgcaggctctcaaggaaatggcggaaaagaatggaggtaaaataacatgtccaaggacagggcttgtctgcaactacacggagttagttaaggcatatatatcatgaacccatatgctcataatcctcactttggtcaccttttcaatggatgactgggaggacagtattaaggccaaagaaactgaaatttccaactttctccattactctttgtgaatatgcacttgcagataaaactttgcatcactttagaaacagctcgttcctttgtatatcaagccatttcttcatttcagtcttatgacaattttctagtcaacatggttttagtggaaacatgtttggctgctttgctctgatatttttattcatgtttttcttcttatccactagtagtttctgtataaatcaaccggcaaagtacactttattgtcccactaccatttcacaaaccacagttccgattctactatcagtttcctcacttgaggtgtataatttggttctgtctggtttcatctatttggataccatcctgattcaacatgttcatcatttctcttttgtttgttggcttcggaaatggaacgaggtataattccggattaagaaatagagtaacactaatctttttattcactccaatatctcaatttattggtatattgctatcgtagagactgtaaaatcgattacattgtctctgaaagcaaggttgtgcaataatgattgagccattcagctgcagatctcagtacacgaagctcaccgtataggagatctcttgccatctgccttctaacagcaaatctttgtgatacaaaatagcattcttccatttcctgcaaaggcacccaccaataaacgtttttcaaaacctacattgtcagtcattgtgtggaaattagttgagtaaagcgttctatagtaccttgatgcaaacactatgatcctcaatcaatctgttgatgtgagacaagaggatcttatgtgcctccaactctctgttcccgtctttaaaaggaagccgagctagtcggccatcattttgtgcagcttcttttgacaaatcatttagctctgagaatcaactatactgttaatacttttggaattagcctcgcaagatgataaaagagagtgactaatttgatttgagcaccttggggaatgatacaacagagaacacgagcaaatgcacggagagattgtggaatgccttttcctttccctatagcagatttcacttccctgagagatcaccaaaagtacacttagatacacatgtaaaaagcactgttactgaaaccaattctaaagaagtaggttcattggtattttcctatccactgttcacatcactcttaactgctttcttactatctcccatgtttccattctttgagtacggatattgatatgtaagcagttaagaacttgtaatggcttggtaacattctaaagctaaactttaatacctacttgattgtgaaagtatcacaagaagagtgaaagatattgatatctttgacagttcgagtgtgatgtgtctggagaagtcccagcttcatgttgcgaagaggatcatcattcggtacatccatttggatttgaacctataagtcaccgcagcagtatcagtttgatactaatccttagataatgactgtgtgaagtttcaacatcccattcagtcaattaaatgacaatcaagttcaaggttggtgagtagcatcttcaatccaacatctatagatcaatgttgttacggctacggtcatgatattagaaaacaaacctcgtcatgaatgttgtaaggaaaggtaaatccaaaatctaacatgagtgtagcatttgagaattccccatacttgatgaatacctacacagagatatttggtaagcttcaacaagcccatgagttttaaccagtcactgagatcgacctcaacaaaaataacattcttatagaatctagtgattattaaaagaaataagtaatgcatcctctgagaagtgaatctcatcgtgttataatcttacctcatcaccaggactgtagttgcgatctgcagtgacctgcaaagttgaaaacttgaaatcaaaatgtactggcttgtttcagtctgtgttgcaagcctttagagtcaagagaaagtaatacggaataaaaaaccatgcattttactagatcgatgtaccacatatttaacaataagattatgctgatgtcgattcactctagttgatgtatggaatatgagatatggaggttagattgtatatcaagtagatgtgcacaaacccttgacgaagagaacacagaatattaaataacaggaatggaagtaaacctctgatagttgattgtcttcatccctcaaaacgattgatgcagaaagcccatcatggttcatgaagtctgcaaacggaatctgttatatcgttagaacatctatcgtaccagaattcaccataagtaatctggaaagatgccagagctaaattgaaagcaataccagtgatatgcgttttgagttttcccacgcacgagatcccactgtccagcaacaagttatccagattgagtaagaacaacacaatgcataaaacctcccttatgagagattgtacatggttgagtaacaccagaaacagatatagagccaaatgaatacttgtgaagtaactttctcacctaaagcatatgcatacatgaaatcttccaaatctgggcgttcagttactatgggacaatgttgtttgaatgcctaagaatcaccaaaaagtgattttagaactcttattcactaagatgaaaaataaattcgacacatggaaatacatctaccaaacatacacatatgacatatgtatactacgtacttggttagcttgacataggacataatcatagtagccttcgtaatatgctaagacttgttatgaactggagtataaaacttgaagaagataattcaaaatttaaaccgtaaataatttttcagcggtatatacacaggtaatatagcaccttgatagacccaactcggtttctcaatcaaaaggtctgatatcaccacgagaccaaacagacaagacaaataagttttgtaactatttagtctatatgtgtgtgcctgtcttatgggttcatacactattcttaacggtacataagcagtcgcttgaaggccttttaaagaattaggaacccaaccaaacagttaccagtatcactagaaaaacatacttacctgcgctacaaatgaaaagtccttttctatctgagctttttgttttactgtttcctggtgaactgcactacaacgaatcatgctgagctcatcttcaccccaaaatatctaagagaataaggaaaccacttttttttattattctgcattgtccaagatagcataggcaacaaaattgatagtaaggcaattaagaagctttttgcgtaccaggttatatggatcatatcttaaactataactatttatatttgtatatctcttttggtaaaataacacacattaaagaagtggccaaaacaaaaattcaagactcgaacatatgacataataactagagtgaaatctcaccgagctatgcatctctgcaggttgaggaagtcggctgatataagggacccatcgagacttctgattcaaaagcaatcagagactaagtcaaaaccaaaacactcacatgaaatgggagacttattttaagtcaattactcaaatgttgatgccctagcttacttgacccattttcttctctcttattagaacagcagcaagcattccgatattcccaacttcattgctcaataaaactctaatatccgaggggagctcatctggagttatttgctgaaattttaagttagaacaacactaatggcataaaaagaatttccaatacttcttaagacacatgataacagaaaagctcgtttcagtagacaacaatataccgcattaaaagggactttcaacatgcagtcaccagcatagataactttggaggcgaacagtgacctgctcagaagttgatatagttattaacatggttagtgtatttgacattaaagataaagcatcacaccaggagacagcctctggtaggaaatgaaattggttattctcacaatcactcattaaacaatcgcataaagatggaaaacaatcagattactaaacaagacaaaataacatgattcaaagttgtacaatgtttcaactattgatgacaagacagaaccatattaaagaacatcaagacaagtcatataaaaattaagctgccacagaaggtatcaacaaagaatctgatcattacattgaaagggaactatgaatagaattattgaatagagaaaatgtgtctaacaatccatattttaattgccggtaaacagaaaaccgaggtactcgaaaaacggattttgaaaaatacttgcaaagttgcatcttattcaaaacatcatcaagcccacctgccataggtggatttcccaatcgaaagagtattagttatctttgctccagcaattcgctctaaccagggtaagaagttattgtccaacgaagcctagatataaaatggataagatgatcgtaaatcctcttttgtgagagacataaaagttctgtacaacatcttcttacatcaattagctcccaaaatcaacagtctgtttggttaactatagatagaagaagctaaaagaacataaaggtttcatctttggtatcaattgctatcagtagaggagaaacatacataacttagaaaaattcttggaaccacactcaggtatgataaaacttttctaacacttgagataatcaagctgtgaacagtccatcacattgatttcacaaatttcacgaaagtctcaatctttcacaaatcaaacctgagtttggagctctaacgttagtttcccggcgagactgaaacgcttggctaaagagctaacattgcgcctttgttgaaacccgaaaagcttcactgtcgaaatgcagaatagcatctccagccaaactggatggcgcgtgagcaaccaccgctcgtattatggactcgtgtttcgactgcggctagagcagagcggccaggaccagacgatattctgatgctgattcggtccggtttgtttcggttttaaatttcagataaatcggtttgtttttaattgattttgtagatagccttccaattttgactttttgataccttacaaagtgaaatggctttgagagttacttgcctctagcaacagtgtctgtgtctcctcatttttcttccacaatctcaatgcctctatttgaaatgttgcattaattttctgagtaaaagcgattcataggtgctttttgtatttccaatttcctaaagaatgatattttttttattgatggcaaaagtaatacaaatgttaaaaagaatacaattcaaatacacaatcaatctacgaattacaagtaatgaaaaagaattacaatatatgtttttggttttaggtatcatcagtagtttcagtttcacctcctcttgtttttgctcccaagcaacaaacacaagtaaaacaaaatcctaaataggaatccgaaacctaccgtgataagcaagcagttccatttactaagctgtgtcactccttgctgcttcagaacatcagcacccgtcgttaaacacgtagagctcgatatcctcatacctatcgaccggctcacagaatccaaaagcctcagcttcatcccatacgtcaattctcccaaaggcgagttgtcgaaaagctgaacacctctcacaaaacattctgtaggatccgagaactcgttctgaagaaccgcctcgtatggatacttaaccagagaaagataatgaaaccaaatccaatactgagggattcgatctctgttgatgaagaagccactgaaaagcaagaagtaagctaaaatagcaacaacgatcgtgtagcctaacatcacatgtggaacgacgccggataagaaagtcacgaaggagcttccggaccagaaagaggctaagatgattaagcagtagaataaaaagcccattaggcctccttcaagcccaacagcccaaaacgtcgtcactgcgaaagctaaagagaggaagatgagcgaagggaaggtaacaatggcgtgagagagaacgtaggaggatctccggtaagcgttgtaagctgtttctctcatgaagatgtaacgttcctggaggaacacgggaagagcatcggcgcaagtgtagaacattgttgacattgcgaatgcgaagaaccctaaccgctcttgaactccttttggtgaattatccaatcgccagaatacggtggctaagatgaatccggtgacgattacggtggctaatcgcattccgagtagctccggttgtcgtcgggagttgaggattgagcgtctggtgagagttttgatttcgatccagaacggattcgcgaatgcagggacggctaaggttccgccaccgtggtttatgacggaggaaccaccgccgccaccggagactagttttcctctgcttatgctggcggaaatcgcttctttcaaggttaaatttgggtttggagaagccggcggagttagggtttgaggattgctctgtttcttcatctcttgccatttcttgttgaattcaactaatcctcttgttcctccagctgatccttcgagttctctgattagatcgagtgcaaactccgtttgattctcgttttccggtatcggattaccgaacccggcgaaaaagctcggtagactcgccggagaaccactaaagacggtgtgtccacgtgacaagaagataagacgatcaagtaaactgagaactctgtgacttggctgatgtattgacattataatgatactgccactctctgcgattctcttcaatactttaaccaccatgaaagcacttgtggaatctaaaccagaagtaggttcgtcgaggaagagaacaatcgggtcgtggatgatatcgattccgatcgaaactcgccttctttctccaccggagattccacggtgtccttcgtctccaatgattgttttagcagcgtttcttatccctaactggtcgattagggcttgaactcgaagcttcttcttggatttaggtaagcttcttggtaatcgaaactcagctgcaaacattaaggtttcttccacagtaagcatcgggaagagaagatcgtcttgcattacataagctgagataactttcagcatccgagattgaagagcttctccgttaagcgttaccgtgcccttcaagcttcctttagcgatccgattcgctaaagcgtcgatcaaagtggatttacctgacccgctagctccaagaacggcaagaatctctccgtcacgagtctcaccggagatattgtctagaagagtcttggtcttggagaaagatgtcctcctccatggaaccaggtcgtgaaagtcaagtttccggcgaacagagacgttgtaagtaaggttgttgaaagatagaacgaaaggaacaggacgcataagatgatcattatctccgtcaagtgaagaaccatccctgtcaaagaattcatgaacaggagtttcgtcaccaacttcaaccttacgaacgtcgctaacgttcttgagaagttggcctaaagtcaaagatgagctaataatctccatggaatgaaacggtgttgcattatcatcttctactagtatgcgagacatttagaacaaaagatggtaaagtgagaaatgatgtgcttacacttgaaaatcaaaacactctttgcatgatcaaaatgttagtctttgttctctgttttgctagtatctgtgtataggccttatatatatgaagtaacgtgtggaagcgtgtgaacacgaaggttctatgtgttgaatgagttgcatcatcatgagaaatctgttaggtttgtgttgttaacaataatattcttagcgtttggatggaaaatgcgttttggatttctcgtattcaattagggagaggtaatgggatgaccaataaatctagattttccaaggtgataatactaaaatacgtagaaatggctgacacgtggcgattagaatggagaattaggtgaagggtgttgatctaaccgaggtatagatagtatataggattgagatgagatatttcttgcgtttcacatagtgtttggtcaattaattaatgtttttaaaagattcttcgaatgttggtagcgatatagtgattgtttgtatcgcaagcaaatgtgtacctagataaactattcacattttcttttgttttcgcgaccgaagacgattgcttatgctgctaactgcctaaaagttgcaaattgcaataattccggaaccccaactaattctaccaaatataatataaaagttatatttgataaagtagctagatttgtatttagtttgggaatataaactcctgtttttgctatgaaagactacacacaatctccaagttcattttttctatttcttgattatttagttggtaacggtggaacattctttaccaaactcaaatattgtgtttggtctttgtttcctctgttttattcacagtatacagaagctgataaaacattctttttgttttgtaaagggtggagtggtggtttaagagaaatataataaaaatcgtcaagtttgttgctaaaattaaacatgcatgcgaaaattacacgagaatcataaagatggtgtcacatttcaaatactatttgttaagaaagtaaaaatagtgatgtctttgatccatccagggaaagaagaaacagatcaaaaggttaggcaacttcctcttaagtagtacttggtcaaacttctagtgatggacacaatggtaacatgaaagcaaaattgacgtactggcttagcttcttggatttccaatcctaaactttgacttcactgttacatctttttggttgacattttgaagtttaggtgactaacttctacctactgtagtcttccttaccgccataagaaaagggtcaaagatttataataccatctaataaagcttataagaaagttggctactttgaattctattttcgaccaactgtttagttgtatatacttttgtttttaaaaagtgatgcaatttgaattttgtcaaatacgttatgtttacaccgaccacgaaagatggcatatagctcacacgcacattaaaactactaaattacttcactggtagcttgtggtatctttatattagtttgaactttaaactattgatgtagttcatattgttaagttaaaaacattaccaattgtgaattaaactaaaatcttagtcctttataaaattgtgaacctaacatcatgtaaaatgttagatgtacgattctttctttagacaatatatgatagctatgaaagaaaaaaataataattatacaacatatatcatcaatatctcaaattcaaaaagacaattttgctttcacaataaaatttctgtttcggaaaaatttacattatggcgttcacgccctcttattcttgcttccaagcaacaacgaaaaataaaacaagatcctaaagaagaatccccaagctaacgttacccacaagcaaccccatttatccagctgctcaattccatgctgcttaagcaaatcagagcccgtcgtcaaacacgttgattccgttaactccatccccaagtaaccgctcattgtctccagaagcttagcctttgtcgtttcagatactccttccattattgtattatcaaacacttggtttcctctcacgaaacaacgggagggatcatcgaattcgttgtgcagaacagcttcgtagggatactttagcagagaaatgtaatgaatccatatccaataaagatggattcgatcacggttgacgtagaatccgctgaagaggaggcagtatgagagatagccaaaggtgaccatgtaactcatcatcacgtttggaatcacaccggagacaaatgtaacaaacgagcatcctgaccagaaggacgcgaagatgatcataagatagtagataaaacctgccagaccaccgtttagaccaacgaaccagaacgtggtcgctgcaaagcctatggaaagtgcgaagagatgaggcagagttactaaagagtgagatataacgtaggaagatcttcggtaagcgttatgcgcggtttctcttaagaaaatgtatctttcttggataaaagcgggtaagccatccgcgcaactgtaaaacattgtggccattgcaaaggagaagaagcttaacctttcttggacgcctctaggagagtcatctactttccagtaaaccgtagccaagagaaaaccggtcatcatgactatgaaaactcgtgttccgataagctcgggcgttcgggtccagtttatcatgtagcgtttagctaagattacggtttcgacccaccatggatttacgtatgaaggaatagatctatatgaagtagagacaagtttgcctcttgaaatgcttgcattgatggcttctcccaaagatgatgagttatggtgaggttcttgactaactcttagcttcctatgttgccaatttcgattgaattcgactaaacctcttgttccttcgggagatccttcaagatctttgattaggtcaagtgtgaattccgcaatgttctctttttccggtatgggactaccaaattccgagaagaacaaagggagagtagcaggagaatcactaaacacaatctggccagaagataagacgattacacgatcaagaaactccataatccgaccactaggctgatggattgacataattacgatgctgccgctacgtgcaatctttttcaagacttgcaccaccatgaaggcactagttgagtctagtcctgaggttggttcgtcgaggaacaagactataggatcgtgaataatatcggtcccaattgatacacgccttctttctcccccggagacaccacgatggccttcatctccgatcacagtgtttttaacagttgtgagccctaattgatctattagggtttctactctgtttcttttctttgatttgcttaagcttcgcggaagcctaaattcggcagcgaacattagagtttcttcgactgtgagcatagggaaaaggagatcttcttgcattacataagctgatatgactctcaacaaacgagattgcaaagcttctccgtttagagttaccgtgcctttcaagctaccttcggctatttgtcctgctaatgcatcaataagcgttgattttccagctccgcttgcaccaagaatggctaggatctctccttctttagcctctccagtgataccattgagcagtgtctttatcttagcagggctatgtccgaaacgaagaccaaaacgctgttgaagagtgacgttataggtgaggtcgttgaaagcaaggacgaacggaatgggcggtatctcagattcatcaacatcgatcacggcgtctctttgcagcatctcgccggaagattaacacaaagcgctgtgttattattttattgttggagtaaccttgaagcttatttgaagaagaagctattcaagaaaaggaaattaggattagacattattgtttaggaagctgcctaaataaatatgtaagttatcctaaaacagattaggaagttgtctaagttttctcttataaaagagagatactaaagtgtggtattcctaatgagttttgagattgagagattgtgagagagctttagtttttgagtaagtttctaaagcaataaaagaaagaagtcttttataatcagaagtcttgatctaagatttaagttcttaattcaatatttatatgatcagcgattcatctagagatcatgaaaacgattagaacattattaatagtatcaattatatcttccatttcttgagaaaaacttataggattggaagttttcaatctattaaaatgttgtatcattaagctctattttccataagctcttaaagaattcatatatgtgctggaaaaaaaggcaagaaaagagaaaaataaaagttttacctgatgacgtagtttcttagaagatcgttgttggtgtgatcacgtaaccaaattgaatgcatttagttacggccccatgacagtagagatcatagtctgttgcacttaaaagacaattattaatggtgatttggggtttttgatataagaaacttgtgagaggaattatgccataactcaagtagtaattaaattacaaacgttgagaagtttatgaagcgtcgttatcgattctaggcgaaattagatactgcatatatatactcgtgcaatctacaaaaggtttcgtgacgtatattaaaaggagtcttattaaaaatgtatattgcatttttgtgtgttgtgttgtgtacacacacacagttcctgttttcttatggctttgtcctctatcatcacatgcttggctatcgttgtatctgatgttgcgctaacatgcatgaagaacacatgcagtttaatcttgttcccctcttgcctttttctcacggcataattcatagtacaacagtgagcgatgattgttaattaactttcatttgcttatatattctatcggtttaattgattataagtatgtcaaaatggtagaagattaaattaaaacgccctttagaatgcacaattaagcatgccagaacacaattaaactttaaacaagtactatttatattatactactacttagatttgaataacacgtagagattctaaactcatattcacagatgtaaaatatgaaataatacaaactgatttaatcatggattcatgattactgtttaaatcttagcttgaattattacaacattctcagacattaccaaatttatctatgtttcactttattttctcgaaccagacgataactaatgtgtggaaatatttaattttcacggttctagttaaattgcgtttgtgtattcaatcaagtggttcaaatttaattgcattctgacatgctttaaatttttgtcattgaatagtcaattaagcgatgtctattcttgacccaaaaagtactattattgatttatggtttagtgaatgcattaatcagattataattcgctagattttgaatggtctattttttcatgactacgaatttcgggaagggaccattaattaaacttttaaatatttacttttaaacgtgctatgcgccacgttgatttgcatatccactatatttcgtagtcgactgtgtgttgatatttcgtaatctattttctaccaaacaactttgaggttatgaatcttttgatcttaatatgtatagtattcatttcttcttatcataattcaccaaatattttgagttaaggtattgtccactcttgttcgtgtatttcaaccccacatcttaaaaagttgtatatatatatatatatatatatatatatatatatatagatgcataatttccaacccattttctaattagatttagtaaagtttaaaatttggagacattaaaaattcatatgtatacgatacgagacactaaataatgctcttaagaatatatgaatgtctatctgtctgaaacctaacttcaatcattactacattttcaaacaacacctcagatttttatttttttagtacatagtaattttctacttttatgtatagaaaaataatatatatatatatatattaagtaacttcaactgaatcatatgttgaaatctaatcgtgtactcgagtaattattatgatactaaggattttaagaaaaaatccttttacaatattcccatgatgacacaaaattaaaaatgttacaacttgattagaaaactacaacaacgtatattatatgcgtttgttgtatgtttttgtgcttgtagactaccttcacgtcctcttattcttactcccgaacagcaaggacaagtaaaacaagatcctaaagaagagaccccaagctaacgtaatccataagcaatcccacttgctcaattgagttataccttgctgcataagtaagtcaggtcctgttctcaagcatgtggactctgttatcttcgttcctaaagagccactcagtgtatctaggagcttaaccttcatcacatgggacacttccgccaaaagcgtaccatcaaatacttgaactccctttacaaaacaacgtgacgggtcatcaaactcattgattagaacagcctcgtagggatacttcagaagcgaaatgtaatgaaaccatatccagtacaacggtatccgatcccggttgatgtagaatccacccagcagtagacaataggaaagataggcaatagtgaccatgtaactcatcatgacattcggaattaaaccggaaatgaaagtaacaatggaggatccagaccaaaaggctgcgtatattatgaggcagtagtaaaagaaactctctaacccgccgctcaaaccaacggtccaaaatgtagttgcggcaaatgcaatggagagagcaagtagctgaggcagagacacaagagcgtgagatataacatatgaagatgttctgtatgcgttgtgcgttgtctctctcaagaaaatgtatcgttcttggataaaaacagggatgttgtctgcacaacaatagaacattgtggacataccgaacgcaaagaagcccattctctcttgtgcacctcttggagtgttgtcaagcctccaatatacagtagctaagagaagaccagtcaccatgacagtaccaatccgcattcctatgagctcaggcgtgcggatccagttttttatgtaccgtttagctaagataaacgtttccgccaatggcgggtttgcgtatgaagatactgtttccattgatataggattggctccagatgagccagagactagtttccctctagaaacacttgcagcgatggcttcttttagagatacgcgactttgtgttgtggctctagcagtttggttctgttgccacttttcgttgaattctactaaatctctggttccttcagaggatccttcaagctctcgaatgacatcaagtgcgaactctgtgatgttttctttctctggaatgggacggccaaagctggagaagaacgaaggaagactaaccggagatccattgaacacactcttcccgtgagataagatgataagccgatcaagcaaaccaatgatacgtgcactaggttgatggatcgacataattacgacactgccactctgagcaattcgtttcaaaacctgcaccaccataaacgcattggtggagtctaaccctgacgttggttcgtcgaggaagaggaggataggatcgtgtataatatcaattccgattgacacgcgccgtcgctctccgccagatactccacgatgtccttcatctccgattaccgtatccgccgcgtttctaagccctagttggtcaattagggtttcaacacgctccatcttcttcgatttaggcaaacttctcgggagacgaaactcggaagcgaacattagggtttctttaacggtgagcatcggaaaaagaagatcgtcttgcatcacatacgccgatatcactttcaacaatcgagattgcaaaactttttctccgtttagagttaccgtgcctttcaagctatcctccgccactcttccggctaatgcgtctatcaacgtggattttccggctccgcttccaccaagaacggcgaggatttctccgtcacgagcctcgcctgtaatatcatcgagtaaagtcttcaccgaagcggtctttcgccgggagaaatcaaaccgccggcgaagtacaacattgtaactgagattgttgaaggataagagaaacggcacagatcgtgtttcagccgcgggagcgagatccaatatgtgttgagtcggagcattttcgccgggatattttttccggccactgtcgttgaaatctttcaggagttcgccaagcgtcggtgactcgttgccgccggtgtgagaaatatctaaaatttccgccgaaacacgtggcatcttcaacgatttagttaactatttttggttgatggaagtttaacggcgtggctgaagatgaagctaactgctaacagtgtagtatcatagtagtataaaccctgagaaaaccataaagccaaaaaaattataaaatatatgtaacatacttacgaaaactggattttagtattcttgagaaaagtacgaactaactgcttaaaattctacaaatgtacgaataagttatatgaaaaaaactcacgaaattaagaccaaatatatatgggataaattttataatgatgaggcaagattgatgatttcttagtctgttaacctttaaagtataaagacatgaatcatacaaataaatagaactcttaattactaaacttatgaaaatattgaacttacttgttaaatttttagttatcttcttttagaagccaggaaaaaaaaacttgttgttcaatttttatttttttgtctgtatataaattagcagtgggcacttctctcgctcttcgtatttatagagaagaagagagaaaaataaaactcatttattgttatagtttggattttgaaaattcgaaataaataaaattaaatacagaagaaatgagaaacacgtctcccatggtatttataggaaatcaatgagaaaataaaacaatattaaatggataaaagtacataatcatagaaataggaagaagaaagaatcaagagaagaaggagttagctgattgtatttcaaacaaagaagtttctatagcagcaagtaaatggcataaaagaagaaagattggtaattattgtaagttaggtaaatagtagagtgatgtaaaaatagattaaatagacgaaaccaactccatttatgtggagacttatacagtcatcaacacactatatagtttgaaagatttgagctacgaggtttttaagtatcctaactcatatgtcttgctcttagtttgtgcaatcatgacaatttgacatttgacaatcgtgattcgtgagtactctactaacgataccatttttcttattttctatttcaccgctattttttgtgattgtggataaagtatacgtacttttaagtaaagtttataacgaacgtatgtacttctttcgtcgtggctccctaatatccataaagatcgtgagtcaattctattattgaaatatgtggtgtggtagctagataatagtgaaaaacatatacggaagagatggtttgaactttgaagaaaaagaaaatcaagatcatgttgtagctagcatatgaagttgctactttaaagatgaatatgaagaatgaaaatatttatatctcgtagtctgttggcgagaaatgcatgcctaaaggaagcatcgtgtagttagtttaaaaaaaaaaaactgtaagtcattgtaaacatttcaaactaagttatcaagttaatatagttgttttaaatgttaaaataaagtaattaatcaagagaggttagttactattgttttgtataagttaggtctacctctaaatcttcagaaggaaaaactgagaaaagcaaaacaataattgtatggaacataatggggccatgaagttatatatatgtatataggtaattaggtttgtatcttaactttttgaaaagaaagataataaatgcagagctttaattggtgtgaagcatgcatgctggggccatgaatttagacgctaacgttttgtggctcgcatgactctacaattaaaacctcatcacagactgataggtgccaccaccatagtacgacttggtgccaccatcgcttctttcggtatggactaattggtgccaccacccatagtacgaataataagtctataaatgaaaaggagaaaatagatcaaaataaaattgtataaaaagtgtatttttcatttatctatatgaaggaaaaaattgagcacgtaagactgacagtatactattagaataagaacaaatttgtatgcatatttctgttttttttttaatgtatttccgtttttttttaaattaatataattttatgtataaagtaagaaattaccaacaccagtcgattttttttatgttttaggaaccaaagtcttgaatcacgtgcgcttgtatactagcgataactcttggttgaacgacaatgcaatttggtttttggcatttaaaatctgacctaccactcaacaatgttacgtttacaaccaaattttgcttgaagcgacgcctccataaatgataatctcgtgtttctttttatattttgtttgggaaatatggttccaaaaccgattatgatttaacatgtagaaaaatatttcaaatttaccatgtcgaatcgtgtattctcctcataactagatagtcgaattttgaccttaaaactgtaatctaattagctccctatcaaacattcactgtattttgtgtgaatattacacgttcttaaaaaaacaaactgcaaactaagtatattggtgcttagattgtggaatcgatttgataactataactatggagaaactagaatttggaatactgttttacgttaaatttgcagaatttgcgttttccaatcatgaaattatgttttgacaataaaattgcataacctcgtattaatgggccaaaaaatacatgtcagcccagtccaacaatgagcgagtcgctccacaatgtttttctttacatattacaagtgaaccacggactggcctgcggatccataggccaaatcaaagaccggatcaatatcttaaagtcaaattcaaatcaaaacataacatacaggactgaacctgtctgactcatcacaacaacctcaatgtaagaccaaattttcattgaaaatgctcgttgcttctttgttttgagctcgaaacgttgttgcttatgatctgtttcactcttctctattctctcttcttcaacagaattagactccccaaaaatgtaaccgaaaagtccaaaaccaatgctaaacgcaacccacaaaaaagcgttagattctctgctttaatacaaccgagtattccaatttattggaccataatttccttatgtcaagcaccatcctttaataacgtttttggcgaataaggtttatcagagttttttggaatctgattccgagtaactcccatctaaacctcaacggttgaatcatctttgacatatatatcatcaaatcaagttagaatagcatttcaaagaaaaacaccgaaattcctaaactttattataatgtaaatgcatgttctttattctccacttgagtaccgcataagaaattagatatagaaaacataagaaatagaaaatgacaaaaacacaagaaaaatctatcattctcagttctctttggctagtttttcctcaacagagtgatcactaacttccttttcgtccttgttcttcatcattagctgagataatctttctgcaacacttaacctagtgccaggtgacacaccgttcttcccgatgatagattccagaaccgcctccgccaacaatttgttctcgatcacagcgatcccggtttcagggatactatcatctttcgaaaacgcaacctacaaaacagtatagttcacaacaaacacatgtcaacaaagtattcaaacctacacgttacaactactatcgttccaaacttccaaacgccaacttttacaatagtacttacatttaaaaaacctaaaacagtaccttcgcaagtggtttaaatgcgaaagcatgtcaagtatctcattccaatttgatatttgcactaacgattaacaaaattcaagcaaagtataaatcaagcaaaaattaccgtaagagagccggtaggggagagagcgaagaggatcgatgaaccgggagggaatgtttcttccttgaagatctccaagaacttctccacagctttagcttcacagtccgtataaagccctaattgtttccatatagccacacaattctccgtcactttctccgaatattgttgtcccgttaacggcagtttcattgtcaccttgataaacttctcaaacgcacctaaaaaggaagcaaaaaaccaatcataagattgaaaacaagacgattaaacctagcttgacgtgtacgtttagtaattggtgtttataagaaagttaccggtgactatttcacggaagaacgggatagattctgttagctcctccgtagtttttcccttccacttgacagatagagaaggaacggcgttaccctctaggtatactccaatgacggtgaagatcacgaatttaccttggatatcaaggcctcggacacctgcgtaagttagcaaaacggaacgtagtcagcaacacgaagaaaaagaagaagataaagaagaacagagcaaacaaacgaaccggcgccgccgaggaataatggattggaggaggccggtgacttgacggacggtacaaacgtgacggagtctacatgaagctt

SEQ ID NO: 106 - DNA, 88997 bp, Arabidopsis thaliana
aagctttgagcccttaaatatgcagagcacatagttaggataatttcaaatattttctatcgttatctttcatattattgattttatatattttggttatttgagataattatatgattattttagagtttatctaggtttttgaattatattataaataaattgagttttattataaataaatcaggttttcttttgtattcagtattcagttgattgatcaataaaattaaaaaaaaaaaaaatagcttttcagaaaaagtattctctaattcttactttcggaaaatcaaagaaaaaatcaaagaatttcttacgttctctagtttctaatattcagaaatcctagttttttgggtattctcaatatcaacatatctctttcttttcttatctattaaagcttctacgacttcagcccttatttcaacaaatcgttttgtgaattaaaaacaataattcaacttggttcactttggttttgaacaattgtacttagatttggttgggttttcgtttaactatgttcattttagataaataaaaacttttaacactcttttatatttaataaaacgtttaatataaatttatcatatctattatatgacttcgtttagtttgagttatggttttgatttgtttgttccgtaatattaaaactaatcgggttataaacacatttcaattcaattttggatttgtcagttctgatgccgggaagtgggctattacatgggctattgaaccccaccatgaatgctctctagattttgggttccggttgttcctacactgggctgaagtataataaaatctaactgaatctgaaatgaaatccatgtgagtttgtcactgaaaaaacaaaaaacaaaaatggcaaaaaatttaatagactcgagggaacgaacgttgcccaaaaaaaaaagcaaaaaaaactagagaaaaaaaagttttaaaatgctccacactttcttaattcttcatatatatatatatttactttgagtaaaccatttaagatcatctaatatttaaatgaaaaatatttaatggaaaagtttatagaagggccctttaatcagtgtgaaagcataaatggtttacagtttgaaagcataaattttcggtttgcaaattttatggcttcaatttaactgcgcatttaaatactttaaatgtattgtcgatttatatacataagtagttcgaaattaaacgtctactgtgatatgtttgaactttattcatttaatagtcattattgcaaaatcaacctctaccaaatttaaaagtaaattaattatttactttgtagtttagtgaatacattaatatcacattatataagtcacaagattttgaattgtcccaaattatataaaactttgaatcatttaactttaaattttctaacatctgtgccatgtttattgcagtagccaatctttttacacctcagataaccagatttttttgatcatttactctctaccaaaatgttctaatgttccatacatatagacaataattttaaaactatttttcatatcctaattctccatgtatcttgatttgtccatttttgatcttctaattttctcatcaaaatgacttgcgcatcaaaattcaattataaggacactaatttcaaatgtgtattcaattggttcgaatttaattgtgttctgacatgcatgttttaaattttgagtcattgaatagtgagtaatgtctatcacaccagaaaatattatatctcaaatttaggtgaatacattaattcactagattttcacttgtccattttttttctttgagtaaaatatactatatatgaagtatgaagtatgaagtaagggagtccggaccataaaacttatatctccaacgtgggatgcgcaatattcatttcatatctactaaacttcgtggttgaacttttgttgatattttattttgctgaccattgtggaaaagaactatcaccaatacttgaatattgatataactatatggttgaaaaattcgcaaaacattcaacagcagcccctagattttaattttttgaactgcacccaaagggacaagacagcaaacaaaggagagcaacactacgaaacagaactatcaccaataggcaataagtaaggaaaacgaaacagaaaaacagaggccaagtcaagacaaaggaacgagcagatagcgaaaccttgaaggagggtaatggtcttgctttacttaagcaattgttctgcctcgaaatttaaatgtgtattcaagtaatcagatgctaatttggatatttaagaagaaatacttgtttattttacagtatattcttttaaagaaacaaagatgaaatgagtataaattttacaacttcttcacaaatgtatagtaacatcgagaagctaattcttcaagcttcacttaaatatgtagctaatgcgcacaaatgtatttgtgggcgctagtaagtagtaacctcacgtcctcttattcctgctcccaaacagcaaggcgaagtaaaataagatcctaaagaagagacctgaagcaaacgtaatccacaagcaatcccacttgctcaattgcgtaataccctgttgtgcaagtaagtcagaccccgtcctcaagcatgtggactccgttatcttcgttctcagagatttactgagagtttcaaggagcttaaccttcccggagtcagacactcccccgagaagagtactgtcgaaaacctggacacccctaacaaaacaacgagacgggtcatcaaactcgttgattaagacagcctcatacggatacttgagaattgaaatgtaatgaaaccacgtccaataaaacggtattcgatctcggttgacgtagaatccactcaacagtaaacagtaggcgagataggtaatggagaccatgtaacataacatgatattcggaacaacaccggatataaaggtaacgacggaagatccagaccaaaaggaggcatagattaggaggcaatagaagacaaaaccctctaatcccccgctcaatccaacggtccagaatgtgatcgcggaaaataccaaggaaggtgcaagtagctgaggcagggacacaagagagtgtgatatgacgtatgaagatgttctgtacgcgttgtgtgttgtctctcttaagaaaatgtatcgttcttggataaaaacggggacattgtctaaacaacaatagaacattgttgggacgacaaatgcgaacaaagtcaatctctcttgtgctcctcttggagtgtggtctagcttccaatacacagttgctaaaagacaaccagtcaccattaccgtagcaatccttgttcctactagctcaggcatccggatccagtttttcatgtaccgtttggctaagatgaatgtttcgaacaacgacgggtttgcgtatgaagatactgtttccatggaagtgggattggatctagatgagcctgagactagtttgcctctagaaacactcgcattaatggcttcttttaaagataatgaacggtcttggtcgagcttattggtttgtggagcagattggatcaggctgatcttgttttgttgccacttttcgttgaagtctactaaagctttcgtaccttcattggatccttcaagctctcgaactaaatcaagtgcgaactctgatatgttctctttctccgggatcggacgaccgaagtcggagaagaatccgggaagactcgccggagatccattgaacacacttttgccacgagatagaatgataagccgatcaagcaactccacgattcgagcactaggttgatggatcgacataattacgatactgccactttgagcaattcgtttcaaaacttgcaccaccataaacgcgtttgtagaatccagccccgacgttggttcgtcgaggaacaagacgataggatcgtgtataatatcgattccgattgaaacgcgccgtctctctcctccagaaactccacggtgtccttcgtctccgattaccgtgttcgccgcgtttcttaaccctaattgatcaattagggcttcaacacgctccatcttcttcgacttagacaaacttctcgggagacgaaactcggaagcgaacattagggtttctttaacggtgagcatcggaaaaagaagatcgtcttgcataacatacgccgatataactttcaacaatcgagattgcaaaactttctctccgtttagagttacagagcctctcaagcttccctcagcaactctccccgctagtgcatcgatcaacgttgattttcctgctccacttgcaccgagaacggcgaggatatcgccgtcagaagcctctccggaaacatcatcgagtagagtctttactccgttttgccgtgagaagccaaaccgccggcgaagtgtgacatcgtattgaagattgttaaagtttaagacgtacgggacaggttttacgtacaaggcttcgacatctattatgtgatgtgcaggatcgtcgctttttacgccgtcgccggaatctccttttcggaaactgtcgcagtctttcagcaactcgtcgagggttggtgatccgatgggagtgatatactgagtttccgccgaaacacgtgtcatggcaatctttctaccgctgagtgatagattcatcggacggcgtcgtttagagttttggcttaagaaatcatcaaactgattgtgaagtatatatggtggaatctgaaagttcttagtagtgatattttttatgatgggacgtatagtttcatacgttggttatttataagaaaaatgtaacatgtgttgtaacttctgtaactaaaaaaaaatattagatagaaatttaacgttcgtgtgggtcgtggctagtaataagagtgaacaataattcagaagtttcgttttcgacattaaatgtatgtaaaaagcaaaatactgtgaattacgtggtcattaaattcttgataagtcttaaaagaaaattcaaaattgtatacagtactttgattttggcttctgctctgcaccacgagtcgcatttaaatttgacatatgtgtctcatcaaccaaatttgaagaatgtgttcttgtacatacagcagagaacgtttgttcatagtaaccataacacattctttggttttaatatcatccaaaacagttttctactcctaatcaccaaatcaaatattaacaccgacacgcaaaatgatacaaaatatgtatctccctttattaatatatgtcgaatcaattgatgaaataatccaaaaaaggaaccatgctgaacctagtgaggaatgcgttgacaaatatgcatgtatacagtagatgtggatgtcaaaactactaagagaacgactctctcttcaatgtggctccacaaaacggttggtaatttgggatggccgtagtttccattaattggttaaactccaatttcccaattttgttggattcatgattaatctatcttcgtagaatattggataaattgtgatatcagagattcagtatataactaataataggttagaaattaattcacaaaaaacaactttttcaagtcaactatagtttataaacaaaacaaataaagagagttaactaaaatttgtgtgaagcatgaaggagcccacgaaattatctcaaagtgtgtggctcgtaggatttgacaaccaccatcatcatcgccatcccttactgattacggtacatgatttcatttaatgttaatttcttaattttcttttatttcatgaagtttcattttcgacataaatgtatatttaggaaataaaaaatcgtgattttcgtgattgttttttttttgaatccgtgataaaggcaatttggcttcgtcaactcgatggccatttcattattatccattatcaaagctaagatagttaccaaattttgtttaaagccttgtttcgatgtatatataaaacatgttctctctcgttagtaaccaatcagtttcaaagcataacatgtaaaattaatacttttcttttctttgtcggccacaaacacattcctttgttttggaattatggttcgagtatacacaatcgctaattcaacagttctactcctaagaaacaattcaagttttaacatcaatacacaaagccaaagggaaattccattttttatatacatgttggatgaatgattgacgaaaatatcgaatcgagtcaaacgatcgacaatgaaatgataaacatgtaggaaaggaaccgattgagatatgaaattcgagagattactaaaaataggaggaggaagccggtcctaacatttatgtggcctaaagcatattttaaaaaattatatataaaaaaaacattatgaaaaacaactaaaaatcatctattgttactcgaacatgggggagattgaagatttactaatggagtttagtacaatttcaaaggagacgttaatggctaagttttgtttgaaattgactattggatgacgactattggatgatgtaacccatacaccaaatttgtactagttacttcaaagctgctgtgacatctaccaaattgtgtttaacgcgatgtttctatatcaaacatgtcactcgtaagtcccaagtactctaataagtagtctaagtttaaaaccttatcgcctataacaagacatgtaaattagtactatcatttatttttggtcggcatggttgttacggcaataaatacattttactctgttgtttctgaattatgacagtaccggtattgagattttgggggtcccaaatatgaaaaacagtcaatatttttctacaaatataataaaatttgaattttaatatttcaaccaattattgagagaccgttaaacttacaaaagataccgtcaatggtaaacgagagattactaaaaataggagaaataagtgcaatttcaaaggagacgttaatggcaagtttttctcttccaaaattgactagtcgatgatgttaattgttaatgttgtccacgtgactcatacataaaccaaatactgtatgtactaaataatctacccggtccaaaccggtttggtaaactgaatcaccgatctagagaatcaaccttacttgtgcctttctcgctcaagtagagaagctcgacggtaaacagaaacacttgatacgacgtcgcataacaacgaacgatgacgtcgctaccgtacgccgatgccgattgtagcctcagggctttagctggccgtgcagagggattcggacgcttcgccgtcggtggtctccacggcgatctctatgtcgtcacttctcttgcaggtgatgtattcgtaaaatctatctacgaatctatatatgtatctctatgcccgatgctttaccgatgatcatactggaatgtatggataaattcgccttcgtattgattatgagatgcatttgttgattgtgttcgaagatcttgagattggttatgtgtggattttagatgatggacctgggactcttcgtgaaggaggtaggaggaaagagccgttatggattgtttttgcagtttctggaactataaatctcaattcatacttgagtgtatcgtcttacaagacgattgatggacgaggacaacgaattaagctcacagggaaaggaataagattgaaggaatgtgaacatatcatcatttgcaatttggagtttgaaggtggtagaggtcatgatgttgatggtattcagattaaaccaaagtctagacacatttggattgatcggtgtagtctccgcgattacgatgatgggcttattgatattactagacaaagcacggatattactgtttctaggtgaggtttgatgattttggatggttatggttagggtaatgtatgctcttgactggtgcttaatgttgcttctggtttctacagatgttattttgcacagcatgacaagacgatgctgattggagcagatccttctcatgttgaggatagatgtatccgagtgaccattcaccattgtttctttgatggaactaggcagagacaacctcgtctcagatttggaaaagttcatttgtacaacaactacacaagaaactggggaatatatgctgtttgtgctagtgtagaagcgcaggtaaactcttttgcagatcttagatcattgcttgaggtctcacctgaagattcttatgtttctgaaatcaggtgttctctcaatgcaatatatacgaagcaggagtgaagaagaaaacttttgaatactactcagaaaaggttaattctcgcttttcatttgcatcagagaaaatcttgttcttattttgaatccaccaccatcatcttgtgtgagtttgtttgtaggctgctgacaaggaagaagcgagaactgggttagtacgatctgaaaatgacttgttcttgaatggagctcaaccttccttgatgacaggagccagtgaagaatgtgtattccatccaagtgaacactacccaacatggactgtggagccaccatcagaaactctcaagcaaatcatgcaaatttgtaccggttggcaatctttgtcccgtccttctgatcatggagttcctaagtaatagttgcgattcaaatgttttcttgcatatcatatttccttctttttctagttattgaaggagtgaataatgcttttgttcttcagcacattatgtttacagtatgctgtgtgtgattttttatgcctttttcttctttgtgatttgtaattggcttcttgaatgtatatcactgaatcgaattctttatcagatttatatcagcttcggttattagagactactcgttttattcttaaagcgtatcgcaagtttgttttttcttagataatgaagaactcgtcataaattatgtaaagaaaatctcatttttttttttttgttctcattttctgttgcacacacaatgcaaacacacgtatctacatttttttcacttcacatcatgtaaaaaatggaatatttagccaaaactatggatcaagtctctcagcctgaaacacacccaagtgatttccaggatgaagaggaagaagatgaagaaaaagaagaggatgcatgaattggtgtaccgtggaaaagatcagagatgtaattctccaaattatctggcttgaatctcaccaagatctcaatgtttctctcctggccgagcattggtaagtacttcctgtaaaactctctgtattctggtacaagtttctttgctattgaaacctttagttcgtccctaagtttcgcatttggtacaactcgtgatgattgtttcatatatgcttcctcaaatgccgtgtgaaatcttctgaaatatattttagcttcctctggtgataggtctgtgggttcttctggtaaagacatgaaaacattggaccatgctgctatctcataattcccagcataagcgcagagtttatcttcgtgcttattgagccaatcatctccaaggagattccttaggggagttgaaccaaccgtttcaatgatgatctgaaggttgtttgcaaggaaaaggtaagacaaagaaacatccttgtaatgctctgctttggtgtctagtttgcatagcaaaaccaggattagccaagcaaaatggacagagagtgcgtgattgtgttgttcatcttccgaaattggagctctgacataggattccagcaggcgagtgtttctcgggagtggatggtctgctaggatttccgacaagactccgctgtacttagaaagggaagagatgaagttcattgttgatcgtgtcagtttatgaatccctcctccaggtgttagagctttcgtcgtatctttctgaatgattgattcaaaatccgtgagagcactgtggattgagacctttagtttttgcagcgatgtgagcgcctgagatttcacaccagctactgcatcaaagtggaatatcatctctatgtcttgccagagatcagagattgcagcctgcagatccattagcgggaagatcctctcgtgcgatttcttctccttggcaacaaattcagggaacttgaaaaggttagtggctgcttcgtttgcaatctcgtagaagcatgactcccttgttgaattggaagcagaaaagacatgatcacaaagaagtttctctccacggaagagcgtggcaatgccaatctttgcagcttttatccagttcttgatcatatgctcgagcgtgacccagtccgttctgtgaaatctggagcctttgtagatttcaatcccgagcaagctcagcccttcatctacaatagattttctgacccgcttataaatctttacgcactccttaccatatccgcaacttatcatactctctgctatcgccttaaggtcagacatcaccatagctgaagctttctcaacctgagtgatcgattcgccagctttcctcatctcattgtcactttcatcgtcgtcgtcagatcccataacatcttcaaattcagaattgctggagattgaggattgaccggaaactgattcaggatcaagcttgtctctgtttgaagataatatctggaagaactctttttcgagccttgccatggcgatctgcatcagggtctgagctagagcaagctttggagattgagagtcttgagagacaagaaagtgcatcgctctgcgcaaatcacggacacatctgatgaactctttagcctccttcctgctatggttgaacagagagacaatcttggtgaaggaaggcgtgttcgggtcccattttctgatgacggagtccgctgtctccacggtttcctccatcatagcctgagtaaagttctggtttagaggagaagccgggaaagaagtgaatgaagaaggcgaagaaggatgatatttaggagatgacgaagagaagaaagaaaatttcgccattttcgccattgaagaagaagaagctctctattctcttctttctgaattgaaagcgaagccttttaaaatggtgttacttggcttttactctttctattttaattagaaagatggtttttaacaattatatagagagcgagattggtcttgactttgaaaatgaaatcgatgacgatgtgcttacctgtgattatagacccagaccacaaagaaccattgacttcgatgtataatataagccttatatacttaaaagataactagagtacaaattttatatacatatgggcgacaaagtttttgctatccacgtctagaactagaattatatgactatttcattctgtcaacttataattttatataacagttaaattcatcaatttcatttcatttgactttttattgcatcattcgcattattgatcactaattatacttcttgttcgaatttcgtattggaagttttttgaccaaagaaaaaaaagaagactaatagagtttcactagaaaagtccgaaatttatatatttagcgttctcttatataaacgcgtttctacatttcaattcttgtgtgtctgtcaacgtctgcatttcagttaataagttatagttatcacagtaattaacgttttgaatcaatactatgatacaataagttgttaacgctgtccttgcaaactaacagctatacgtttattgtaatagttaagagaaaagtgttacaaaatatttaagttgattttacagcctaatgttatattagcactgttgatgtgtcataatctgatagtatatgtttgtgcttatagaggatagaaaaacaaatcacaaattatgtattatataaaactaatattctttcgtctgaccaaaaagatgatcataaaagatacgtactatacttcatgatcttgtctagaagaaaataaaacctatattccaagttttcccatacattagatatcatatacacagacacaagacattcgcatgttatgtatgtatggttttgcaagaaaaagtcaaatatacgcactcataaatcatgatataaagatatacgaaccggaggtattggcaatttccaggcgttacagattcttaaaagaccaaaatggagattcgcttaccaaagtcaactacatttacatatacatttcaactaatttggcttcaacgtcgtatatacgtgagttgtctaaatcattataagagcatataagctagtcaacgttttgtttcgacgactctctttctttaaacaatggctagtgttacttcacgtattcggttacattgctaacgaaccttaaagaatttagttattgtagctgtcttttttccttaaaagtggaatcttcttcaatcaacaaagcaatgactattgatcaatgccatcatttgattacaactcacagtttttgttttgacaattatcttgttatatacatatgagagaaaatgaactatagtagtgtttagttcgtttcagattgagattgattatgtttatgttatttgtttttttcccaaactttactaaggaagattgtaagcttgggggagccctaacgaatcagaaatgaatgatatcgtaagtgcgaaaacaatttgaagactggactgtgaagcggtcaactctcaggcgtagatcatcggagtaaagacaatgccaatgcaaaagtcaaaagtttataaagtatctttgataaccccaaaaatgataagaacataataatccaagtgggtatttttgacttattattatatagatacattaaactctaatgtagctggttctacttctagtcttccttctacaatgtgtattatcgtgtgacacgaaccaacattttggatgaataatataaacatttcttttgctcggaatgcttacatgttttagaatatgaacctctccctctccggtataatgatatgtttgaagaattaaatcttttagtttaaatatatcagaggagatcaaagatctttgacagcaaaacagaggtatacatacaacaagagaatattaaactttgatgtcttactttctacaatgttttcttcttctctcattctgtattatcaatgcagagaataagttatttcgtatggaccagacaaagtataattccactaaactgattagaattgaataagtaaatccatcacttcctggtgcttggttagtcctcccctgatggatcaagtcttcttgtgacagagatcgagtggcaacttcttgtttttctctgtatgcctctcctagagtagatttttgtttctgtagatcacagtcaacccttacgcattcgacttcctcgccactttgctgcaacaacacaaaagaccctgttcagattcataatgactttagaactgaggcttagaaagatagataaacgtctaaggcaagaagatctttggttgcccatagattcaagtaactttattttcctttgaagacactaacgggtacatcgcagacaagataaattacaaagcccataagaaaaactggaaatatgagcaaggtgtgcaacagaagcagaagcatgcgagtaatttctatttggtgatccttttaaacagtcaatttctctgtttacggtcacaattaacaagggacttttgttcaagaaggtaaaaatgtggattcatttgggagtaaaacacacacacaaaacatagaagcaacacaaaatttaacaatcataaaatccaccaggcaggtaacataaacgcacacaaatcacatgaatgtgtcaaatatctaatcttgtagaaagaggtaacatgaatttttttacagaagtgcaattaataattagaaatccataagccaggctaaaccaaattttttggaagataaggtttcacttttctcactagccagatcatactgagaaaaggagctactaaatcctcaatgtcaagcagcttgaaatattgaaaacccagaatcccaaatgctacatcagtaatgaaagcataaatgtttccgtaatagagaggtgagagaacatacattttagagagcttgttaggagtaccaccagtgaccttagccgagaggaggagagcaggctccgctttcatctgaataaaaagatctgactttgatttctccctcagtgagaagaaaatatggatcaaaaccttcccaaatctctccagaaagaacagtagataaatccatcaaagaatcatttagcaacttctcatgtaatctgacaactactcggaacatattagacaccaaagggttcctcaaaaagggtttcagtgcctccccaagttcaatgatatcagaaaacagagttttcttgtcattgctatcagttgagaatctgaatatgcagtcggaaaagacgtagagaccaagaagattaccatagagtggcaaaaacacatccttgtggttcccaacaccgcctacccagctttctctttgtttgctgacatgatctttagcgaaagcaagtagctgattgtggaatttactcctccagtcgagtagttgtgccagggaaaagtctctgtttggtagtttctgtagatggtaacagcaaaactgcaagatcagaagcttttcttcatggtgattatcgatttccttgtcgaaaacccgcctcactagatcactacctccctttggtggggatgtgtaatctgcggtgttgaagacccatctcgagagatattgcgaatactcattccagtgccctaagatggaagataaatggttgaagctcagttccaagactttatctacttgagtaggaacttccacggcagtgaagaaacacttctgaacatccgtagcgagttttgacctgatgacatcatcttcgtcctccaacaatttgatacaagtgaaccacatctctagaatttgatatgcgtatacatcacaagctttttgaaatttgcttggtgtagtttcagaggaaatttggtgatttgagacaagaggacctatgagcttcgcttgttccagtataccggatgctataatagcctctgcagatgcatggcgaacatttacttgctcggatggtaagcttttctgtttgatcaagttaacaaagtaggagacacaatcagttatacaactccatcttggttcctcttctttttcagattcgtttttgtggatgaacaaccccgtgagatgcttcacacaaattgccaggcaacacatgagtgtacctcgggttttagcacgtcgtgtgctctcatatagagaagtcagcctgccccaaagatgaaacaccgaatcatagttcaacgaaccaacgtaaatgccttcaacagattccttgttacatgattttttgaacataagaagattccactggaaaagaatccttaaaatgtagttctcacatttatggtttttctccttgtccaacagctctaataatatcacctggagaccgttttttgcccagttccaaatactgctcgactctgagaaactggaatcttctgacttcaaaaaccgcagaaaccacttcagtgttgcaagacgaacttcatatgattgatcagatatacaacgaaggagcctttcgttaaggtgaggaaaatctaatgcttcaggaactttctgcgattgcaaatttggtctttgagtaatctgaaaaacttccgctgcttcatcagatggctgaaatacgcaaccaaaataagatacagctgcttgttctctaagctcagcgattgaagggtcataataggagaaaccataagaagcatctgcatccaagcaatttgtagatagatccaagtgcaatttatagatgtccctgagatttttgctttcagagcatgtccattcaattactcgcatatgatcaagcactctcaaaaaagatgtacagaggatcgggcaagggcacgtcaatggagaagccaaccatgagcaatttgcaaggacattgatcaattttccaataatctgatccttcttagagttatcagcaaggtctctacagtttgtatctaggagattaccaagttgcaacaaaataccgtgaagataattgaaggacccaccttgggccccattagaaggtaatgttgaggcaattcggagcagaacgctttggagtttctcattggaaacaagacctactagagcacgtgatgccaaaacacgaacacggagattactttgagtagagcatttcataataaagggcataaaaacgaacgggtccaggtcatctccactttcacttgcaatgggtgagggcttaagcctagataaaagaatcagaatgggccataaactcggatggacaagatttgcgaggtttgaatcagatgaaccagatgtgtcaagtaaatcagttgctgcctttagttcactgtatatgaaagggtgcaacaaggggtaccttcaagaaaaccaagacaacattaaataatggatgaaaacaatgcattttcaattcaatgtagagacagctacctaaaaaaaagaatatcaggtgaagatcttatcagacatacctgtgaaaaaattcaagtccagtcaaggcacgacgggtagatccacgtttttgaacattaaggaatccaatcattcgacggaccaaggcagtgtatgcaagtgtggcactgtttctgacctcccaatatggtgaagagaaggatcttattgaaacaatcatagcctccgcagaaaacccagaagtatcagtgctcaagtttgtgtcattgaaagtagctttgagaacattgaacgcatgcaccgtcggaacaactccttcatcacggacctttgaaagtttttcatttgaatgcatatcagaagaattgatctcctcaaccatatgtttagaccctttctgttccaggggttccatgagaggcttctctgcaagacctattagccacctaagcgcccgtgggagaagcttctttggtgaaccttccggttctgagagaaaaagagcaataaatgcagcgggaattcctgcacttcgtcttaacacatcgtccactgtctgtccttttgccacagttctttccataagttgctccatccaggattctgtcagcttacaaagtctatgaaaagaaaaaacaaacacaatacgtcagtgaatagaaaaacaagttacaaggacacacaagaagcgtaaagttaaaagcataccttggatcgttcgaacatagtaaacggtggcacaaagctgtaaatccagctcttgtcttatctattgcaccattgtgcttcatttttaaaagtacttccaagaagtggtctccaatcttttcaagttgcttcaggtcaagcagtgattcagaatttcctatcactaaatcattggggactgaagaagctgtatcaccattttctaaaggtctaaggctgctggtaggcaatggaatctttcttataatggttcccaaaagaagactcacctgaagaaagaaagcagtttctatatgaagtttctcaaaaaaaattagaaataccatattctgcatttcaggatgaaaaagagcagctacttgagacaagtattaagaaaaatgaaaacgcaaaacaagtgataccaaagtaaggacaattatcagcaagatgacagaatcaatacctctttcatagcgagccagcaaccaaccataactacctgttctgattgtactgtttcatgcacatgttttggatatgtacttgtgtgttcctctgagagaacagcggcagaatcatcttgaacatttgaaaagaaactatcatcatctattatgtcatccatatcctcaggcaaacacaaagcatctgcagaaaccacccaaagtgctaatgtagttattctcgtcaccagtttcagaagcttttccagttcctttctcatctctgatatacttaacactgcattagagttccagtccaattcctcaaaagtatatcgcaaagctaataataccccatgaacaaaactgtttttacatgcttcagagagatcacgctctccctccgtcacagaagcatcaagccactgaataagtgatttaatatactcaaccacaggatacttcggtttagagttctgattacgacaatctatgttttcacactctctttcacaacaaaaaacagtagtggaaaccttgactatccaaccaaggtccaatacgtactttctgaagataagcctaagagtcaaagcacctgcatcactctctcttacccgtggactgcagactagttgtttggcccaaggaataatgatttggaccatgtcttcacttgaaatgccagtaaatggagttggaaaatgtagcaaaatacggaaagaattttccctaagcctgtcccaactatcaacaatcgatccaactagcaataacgttgaatcatgtgaagtgacaatatcacagtatgggtaaagatggccttgatgagaagtgggatccttagaagccacaacaggccagacttcaatcatgatctgtataagttctgtcgccattatttttctcctgtaaggggcagaagggtagcaagataaatacaaaaaggaacttagccacctcataaacttgaacaaactctctgctcgtagaactgcatttttgtcgcttttaagtggttgcaagctccctagcttatactgcttttccagcgacgtacggacccggagaaaaaatttcctgaacaaactggtccatttcatttgaaaacctgtagacgatgacctcatgttcaagggaacagcctccttcatgagataaagctctaagggagatggaaggctagaagtcttggggtttaagaagagtgtctctgcagcatccacacgaaccgactcatcaacatgggttaaggccatttttagccactcaatgggaatttttaactcaatacccttgatttgaacaactgcaaatgcatctgtacttcttttttgttcaatatccccttcaaggaatgcaagtgtacgacaaactttcagcaatgatactaaaacaaccactttctgttcaactgttagttccatactcatgttactcaactcagtatagtttagcttggtttcttcctcactcggtccaatagatatatacgcaagcaaaagaaatatactgtctacatccagttctagcaaaacttgtactgcataagtatttagattggacctgagtttcgacttgccagaagcaagcccgtaaaggaaaggaggcaaacaatgttctcgataacgcgcataaccctggtcaacaccttcgctcccccagctttcatcacgcaacagttcaaggaaacattttataaatgatgttacagcatagcagacatcatcatcaatatatgcatttgccatctcgaacaacaggttaggactcatatccatcaaagtcttcgcacctaaccgccttgtcaaggatgctaatggaacatatcttcctttacaacgtgatcctaaacgaagaagatagttgacaattttcaacaaagattccctcattcccactttatcatctgtctgatgaacagtggtttggatgtctagtaagaggtcaaacatgaggtgaacttgtttgactgtctggctcaaagggtcctccaaattgttccatataattctgagtactcgagctgccatgctgtctggcattggatcataaccttctgataaatcagttaacatagatgtcttgatctgttgcatgcaaatctgcatcacagttagtacgtgaaaatttaaatgactgtcaatggggttctcgcataaatcacaaagttcgagcaaaattccgtcatacagaatagttttgtgatcacaatcactgttgctcaatcgagcaaaagaggaaacaagaatacccctagaaactgtagtaagaatgcctcggatcaagcagagtctactcaaagatgaaaaactgcagatctcagaacaaatgtccccggcaaatggaattttgctaacaatatcagccaacctaacgacgctactccagcaaaatatacattgcgctataaacaatccaagctcttcgtctttgagacagacctgcagagcagcacagaaactcacaccagcagccacataacagtccctagaaaatgccagcgacttcaaaatgcttacttgaacagccaaaacactctccataaaacttgcatcctccccaactaaacccttaaacttcaaaggaaaccgctgaaacaagtaatacgagcaagacaaagcttcttggcattgctccataacagtaggaggaggcctatcacaagcttcagtgtctaagactataccattcaaccctgaaacgatatcataaccaaccagaagcgcgcaatcttcaattatatcaactaaatatcccaactttggcatgcccatcactgataaagcaactctagacacacagaatcgattaccaccatcttcaaaaccgccatattcatcacaaagctccttaaaacatgaactgatcactgaatgaaacttagtggttttagccaaggctgaaacaagggtcttatgaagaggcaaagaattctccatgaagagtatctccaagtaaaacctaatagcttcccttacagaaactgtctctctctcgcctccttcattctcattggccttggcgagaaactctccgaacgaagcaacaactttcttggcgtgattaacttgcgcgtagattgaattcaacgaaaccaattcttcaatgttggagtaaaacttgggacaagactgagacaaactagattggctcaaagaagcagtgaacgagctggggaacagaacagcactgtaagtataacgatggcgatgctgcagagctcgccacttcgcagacatgtttcagtgagctgaggaaaaacagagaaacaataaaaatttgaactttatttttttcacttgaatgaaaaatagaaaatatggtaaaacagattaaagatcataccgggaaaagcggctaagtgtacgagagagcttattaggaggccggagcaataccagtgagtaacctaagaggcgacgcggcggaggcggaagaaagcacccgccttcaaatctttcaactggagaagatatgggccttacttgtgtttttaatgggcctgatttttagacaaatgagaaaacattttggttgtctaggacgactgcttagttgtgctataatgagttcttgaagccaatatttcagttgatttgagtgtaaatttcagttgcaactggttgcatagctcatcaacacagttcgaacatggtaatgctcttgtctcagattgcttataaaacaattagctaggttcttagactgtcccaaagtgaataataaacaggtgatgatgttaagtggcttttgttcgcagaatcttacgtttttgcagattttattgccgagaccaaatagatcagcccacgagctagttctcgaaagtcaaatagggtaaatctcaaatttataacaaagaacgtgcgtgagagatcatacaatcatgtttgaagaatcaaatctttaattgaaagaaaattcagatatattagagaagactgagggaggactctctgacagtagaaagataattaaactttgatggcatactttctaattggaaagtacatgtctttcttcttctctcgttctgtcttcagcgacgcctatccaatgcagagaaaaagtcatgaagtatggaccaaaacaaagcatgtcactgaattcaaaatacctggtgtttagtgagtctccttctgatggctctagtcttcttgggacggagatcgagtggcaacaacttcttgtttttgtatgcttctctaagagcagacttttgtttctgtgagctcacagtcaacacttgcgcaatcgacttcctcaccactttgctgcaacaacccaaaaacaaaagaccacaattagatccataataacttaatttgaggccttaccaagattgctaaaagtcctaaacaaaaacaatggtcttgcttgttcagagattcaaatagattatataaatatctttcttttcccatttcgcagacatacaagataactaaaaatcccaaaaactgcaacaataaacccaagactaatctaagcctcgattgttttaaacaccaatgttttggcgtctgtgtgcatagggattttgcttaagatgctaaagatatctaaaaacaatgaacataaaagcaaacacaagcaaaaaaaaactgatgactaaagactagaaatcaacaattccataagccaggtaccaataccatgcaaagggcaacacactaatcacatgaatgtatcaaaatgcctaatttgtaaacactggcaccataaacaattcaatataaatgcaattaacaattaaaaaatcaacaatctagtaatctactattctcagtagctttagatcatactcagaaagaggctagtgattccaatatcaagcagctcaaaatattccaacatttgtataataaggctgagagtagagaacaattacatcttagagagcttgttaggagcaccaccagtgaccttagcgacacgtagggaagcaagctctgccttcaattctttcaattgagtagaaagatccgattttgatttatctctcaactcatgaaccttgattctcgctgttcacggatccatttcaacacaacacaataagaaaatggagccaaacataagcaactcaaacaataatggtggaaatgattcaagagtagggacttacccatggcgtcttcgagccctctctgactcagtctctttgcactgctatagtaagacacctgaaaccctaaactgaagaagatgaagagttctaaatgggcctcaatgatataaatgggccttaagtttagtacagacagtgaataatttattctttttagtcatggttaatacgttaatctgactcaccatgtggtatttacaaaattaatcagattgtaatatgtcactttatgtataatgtttttgtaggattgattcaaaattgaccttcgtgtgtcttgcaaatatattttttcttttgccggcaatgtgtcttgcaaattttccatatatatcgaatttggtaatttgaggtcaaatgttatcttcccctaaagaaaagttaggtaattaacaggataaatttattttagtcagctggtcccataagtaaaacgcattaagcggtttttcgttaaaagcttaatctgatttgactctttgatctctccctcttactaatttttttttttggtcagatataaaactctcttatctcgtgatcctcgtcgtctatatattgaaacaaatccagttttctttcttgaaacgtataacaaaaatagaacatcatggttatgtacaaagaggtatgtcttaatctttctctcttttcaattacgagttagctcttttgtcatgcaaagctctttgctttgtatctaaaaacgaagattcatgatacaattattgttttaagcttatataaaaatttggggtttcgtttgtcgttgtttaggattatgtttcgaactcacgagggatacaacttttcacgtgttcatggaaacaagaggagcagcaagaaccaaaggctttaatctttctctgtcatggctacgccatggaatcaagcatcaccatgagcagttccgtcttttaaaatcatgattataatatactcgtcaatatatatacattcatgattacattttaattgatattaaaacatattcatcaggcactgcagtgaggttggccaatgcgggtttctcggtctatggaatggactatgaagggcatggtaaatccgggggattaaatggttacgtcaaaaagtttgatgatcttgttcaagacgtctcttctcattactcttcaatttgcggtaagaatgtttttttttaagaaccaccaaaaaaaaataagttttacctccgaatagaccactatttttgaaaatatcgtaaacctaaatcttgtggtcttttgagaatttctcttcttcttcttctttttttcctccgtttgaaaatgttattaattattaatatattttggaaatgatgaatgtgaagagttggaagagaataaggggaagatgaggtttctaatgggagaatccatgggaggagcagttgtgttactcttggagagaaagaagcccaatttttgggacggtgccgttttagtcgctcccatgtgtaaggtatgtgtatgatcgatcggtctcgtgttcttcaagttttagggtagcccttagtatactatatccttactatataagtgttgacttctaaactttaagattgagatttttaccaaattgagttatttttcatgtaatataatgtctatttcactatttttagtaattagatatgaatcacttgatttttttttttttttttttttgagtaaagttagcagaagacataaagccacatccaatggtgatctcatttctcacaaagctaactcggtttattccaacttggaagatagttcctagcaacgatattattgacgtagcatttaaagaaacccacataagaaaacaggtaacatatttgattatcatcattttagtatagttttcgacgtttaattttctttatctaaaaaagaaatgattttaaaggtaagggacaatgagtattgctacaagggccgtcctcgcttgaaaaccgctcaccaacttttaatggttagcttggatcttgagaagaatcttgatcaggttaatttttttattttttttattttatcgatctcctttgatatctccaagctttgcttttatttaattaacaaaattggtgagtaaatactaagaaattgaatttaaaaaaacaggtatcgatgccatttattgtccttcacggtgaagatgataaagttacagacaaaaacgtaagcaaactattatacgaggtagcttcaagttcggacaagacttttaagttatacccgaacatgtggcatgggctcttatacggagaatctcctgagaatttggagattgtgtttagtgatatcataagctggttaaaggagagagcttctgtcacaaaccaaaagttggagactgagttaaagcatgtagatgatggtttttctatgcaaaaatgagtgtttaatttgcatgtgaactacaacgatgggttttatgtattactactagatcgaagaatgttgtaagttatgtacaccaaacagtacaagtcataatagaggctcgtaaatctttttctgttatcataccattcaaatgaaataaaagtctgtttgattaattttaaatccattggggaacctgaaaaaccaatccaatacacttttttgtttatatatatatatatatatatatatatatatatatattatgattcaaaacatccaattataaacaagctaaatgctaaacccaaaatcttttgctgatttgacgtaattttgaagcatcaatattttttctttttgaacatacaaaaaactcaaattcatgttcgaagattttacttctcaagaatagtacttaaaaaagattgcttctcacccaagatgatccccccaatctactctgcgtgatccaaggggaaactcgaatttaagaacaatatccagtaaattgtttgagtttgatggaaaacatgaaaaccattaataaaaggatgagatttagaacatcgccttaacttttgcttgcaaaaaaaaacttagcgagaccataaagcatctatgaaaggttggctacactaaatctagactacagaaatttatgttgtaagattttatcacatcctacgtaccgtctacagatgtatcatggtttgaattgcacgtcgaaatttcattttgttcaaattttagacctaaagtttgtggcattttgagttttattgaaaaaacgtgtgatatttttggaaaacaaaacatgaactgtggtatttatttgagtcaacatttatagtttgcattcggtctttttacctgcgtttactagctgcaaatggcatctgattttaaaacattaaaacaatcgataatgcgctttcatcaatttaagcccaccagccttatacagaacaaacgtatcaatgataaggtctaagtgagaaactgaaatttaagaacgaaaagtaaccaaccttctggttttacagagttaattggccacattattatgaagttacaacttcactaatgacatttaagaaaaaaaaaagaaaactcatcccgtcattagtgctttacttttggtgttatgaaattgctaaatttaggtcacctctaaaaaattagtaatagctccttcgagcgaagaaaaaggaaattactattgtcttattcaacccttttcaaacatttcttcttccacaagaaacaacaacgaagccatatattcttttgtgtcttagttgctactctcacattacattatctgggatcaaatatggttagtttcgttcttcttctctggcttacaaaaatctttacatgtcatgtgacttgacttttgtcaattacaggctcatgtggatgggcaagttggatatagcgaggtaaatatcattactctgatttttaagattcattgtttttctaatctctcatatgaataagagtcgatgattatgtgatgatttaggaattcatcgagaattcgcggggaatgcaactcttaacatgcaaatggtttccagtcaatcaagaaccaagagctctcatcttcttttgccatggctatgcaattgattgcagcaccacctttaaaggtatctatttacatatacctatatatgcattcattgaagaagaaaggggtgaatattaatgtgggttattcttacctacagatatagcacctaagtttgcaaaagaaggttttgctgtgcatggaattgaatatgaagggcatgggagatcaagcggtctctctgtctacattgataacttcgatcttctcatcgatgatgtctcttcacatttctccaaaatatctggtccatctcttctttgacctcattacacattgacattgctaacttacttgtcataacgttagatataagcctagactgttttaaaaccaaatttctgcgtttactacatgagaaaacaaaatttataaaaacattatcagtttttttttgcaaacaaagaaaaggtctgcttaaaaaattttaaatgtttttattcatacatattcaaataaaaggtttttatttatacatattcaaaaataatttgttctaaaccattgtccattgtctacttgtctaatgcaaattaatgcactagttatccttaatactaaaccgtgtgacttggattgtgtttgttgtgcgaggcagagatgggagataacacaaagaagaagaggtttttgatgggagagtcgatgggaggagcagtagtccttctcttgcaccgcaagaaacccgagttctgggatggaggaatccttattgcacccatgtgtaaggtgaacatatatattcagatatatatcattttatataagaattatgtataattactaatttgatgagagtcagattgctgaggagatgaaaccatcacgaatggttatatctatgataaatatggttacaaatctgatcccatcatggaaatcgataattcatggacccgatatccttaatagcgcgattaaactgcctgaaaagagacatgaggtatcttactctctttcggctataagataagagattttgtttttggtaaccaataaattctggaccttctcggaccagagtcgatatccactgaccgtttaaaacacagataagaacgaatccaaattgctacaatggatggcctcgtatgaagacaatgagcgagcttttcagaatcagcctcgatctagagaaccgtttgaacgaggtaatatcctatatacgcattgaggcaaagttccattggcttgttccagtcacttaataaataaaattacacaaacacacacacacacaattaatctacatgtctaggcaaaataaatgttaatttggggatatgttcatgtgagatataggtgacaatgccattcatagtcttgcatggagaagatgataaagtgacagataaaggagggagcaaactgctttatgaggtggctttgtctaatgacaagactttgaagttgtatccagaaatgtggcatagccttctttttggagagcctccggagaattcagagattgtgttcaatgacattgtccaatggatgcagacaagaatcactactcttcaagtaaaggctaataatcatgaagcaaaaacctcaaatctgattacctcagattcggtttagactataaccacgtcttgttttttgctccaagtgagactatatttttttctttccaaggtctgaatagataaaggctgcatgatagcttatcagattatagatggtttttggaaaccattttttttttttttttgtaaacaagatttgtatttttaattttttggatgttcttgtgattgtctcttctaaagcactactgatttaactaaatacaatttgaattatttttgaaaaatatcaattaataaaaaagaatgatttacaagtgaggaaaaaataaatcaaaattgtagttcaatagtttctagataagttttttttttacaaacttgtcatgattacagttcctcactgtttctatatgggcttagagtaaacttgttttgggccggtttcgttctaaaaaaataggcccatgattgaatctccgccgttagagaacaccactccactctcatagtcgaccttcgagcgagctatggcggtaatacttagggtttattcaccataatctgtcaaatccaaagttgaaatatgctctaggagttcacctaaactcggacgccctgcgaaaaacgtaaattgaaggctaaactctaaaccctagcccttgctggtggttgtagcttgctagtttgagagatgtatctgtacagtcttactctgcagcaggcgacgggaatcgtctgcgcaatcaacgggaacttttccggcggcaagacacaggagattgcggtagctcgtggcaagattttggatcttctccgtcccgacgagaacggtaagatccagacgatacactctgtagaagtatttggtgcaattagatccctagctcagtttaggttgactggtgcgcagaaggattatatcgtagtaggctcagattcgggtagaattgttatacttgagtacaacaaggagaaaaatgtgttcgataaagttcaccaggagacttttggcaagtctggttgcagaagaattgtgccaggccagtacgtggctgttgatcccaaaggaagagctgttatgattggagcttgtgagaagcagaaattggtttatgttttgaacagagataccactgctaggttaactatttcttctcccttggaggctcacaagtctcataccatttgctattctctctgcggtgtggactgcggtttcgataacccgatttttgcagccattgagcttgattactccgaggcagatcaggatcctactggccaagccgctagtgaggctcagaagcatttgactttctatgagctcgatttggggctcaaccatgtctctagaaagtggtctaaccctgttgacaatggtgccaatatgcttgttactgttcctggaggagctgatggcccgagtggagttttggtttgcgccgagaattttgttatttacatgaatcagggtcatccagacgtgagggctgtgattcctagacgaactgatttgcctgctgaacggggagttttggttgtttctgccgccgtgcacaagcagaagacaatgttcttctttttaatccagactgagtatggcgacgtttttaaggtcaccttggatcacaatggcgatcatgtctccgagttgaaggttaaatacttcgacaccattcccgtcgcatcctctatatgtgtgttgaagctgggattcctcttctctgcttcggaatttggaaaccatggtttgtatcagtttcaggccataggagaggaacctgatgtagagtcttcctcctctaatctgatggaaaccgaagaaggttttcagcccgtcttttttcagcctagacgacttaagaatcttgttaggattgaccaagtcgagagtctgatgccgctcatggacatgaaagtcctaaacatttttgaggaagaaacccctcaaatcttttcactttgcggccggggtccacgatcctctctaaggatactgagacctggtttggccatcactgagatggctgtctctcagcttccaggtcagccaagtgctgtgtggacggtgaaaaagaatgtgagcgatgagtttgatgcatacatcgttgtctcttttaccaatgctactcttgttctttcgattggtgaacaagttgaagaagttaatgacagtgggtttcttgatactaccccatccctggctgtctctctgatcggcgatgattctctcatgcaagtccatcccaatggtatccgccacataagggaagatggacgcattaacgaatggagaactcctggcaagaggtcaattgttaaagttgggtataatcggcttcaagtggtcattgcattgagtgggggagagcttatatactttgaggcagatatgactggccagctgatggaggtggagaagcatgaaatgtctggtgatgtggcttgcctggacattgcccctgttcctgaaggaagaaaaaggtctcgctttcttgctgtgggatcttatgataatactgtgcgcattctatctctggatcctgacgactgtctgcagattctcagcgtgcaaagtgtctcttcagctccggagtctctgctattcctcgaagttcaggcatcgattggtggagatgatggtgctgatcacccggcaaatctcttcctcaattctgggctgcagaatggtgttcttttcagaactgtggtggacatggtgactggtcagctttcggattctcgctcccggttcttggggctgaagcctcccaagctattctccatttctgtgagaggccggtctgcaatgctgtgtttgtctagccgaccttggcttggttatattcaccgaggacacttccatttgacgcctctgtcttacgagactctggaatttgctgcccccttttcatctgatcagtgcgctgaaggtgttgtctctgtcgctggggatgctctgagaatttttatgattgatcgtcttggtgaaacattcaacgaaacagtggtccctctgaggtacacgcctagaaagtttgttctccatcccaagcggaagttgttggttattatcgagagtgaccagggagcattcaccgcagaagagcgtgaagctgcaagaaaggagtgcttcgaggctggtggagtgggagaaaatggcaatggcaatgcagatcagatggagaatggtgcggatgatgaagataaggaagacccgctttctgatgagcagtacggttatccaaaagcagagtctgaaaagtgggtctcttgcatcagagttcttgatcccaagacagctacgacaacttgtctcctggaacttcaggacaacgaagctgcatacagtgtctgtacggtgaatttccatgataaagagtatggtacactgttggctgttggtacggtcaaagggatgcagttctggcccaagaagaatctagtggctgggttcatacatatttataggtttgtggaggatgggaaatctcttgagcttcttcataagacgcaagtagaaggtgttcctcttgctctgtgccagttccaaggaagactgctggcagggatcggacctgtcctcagattgtatgatttggggaaaaagagactgcttaggaaatgtgaaaacaagctctttccaaacaccattatctctatccaaacttaccgtgaccgtatatacgttggtgacattcaggaggtgagtggtagatcctttttcctatatattttacttactactgtgtgctttgttttatagaaatatctcatgtagccttttcattatcgttttgcagtctttccattactgcaagtacaggcgcgacgagaatcagctgtacatatttgcggatgactgcgtgccgaggtggctgacagcatcgcaccatgtggatttcgataccatggcaggtgcagataagtttgggaatgtgtattttgtgcggttgcctcaggatctgtcggaggagatagaagaagacccgactggcgggaagatcaagtgggagcaaggaaagctgaatggagcaccgaacaaagtggatgagatagtacagttccatgttggggacgttgtgacgtgcttgcagaaagcttcgatgatcccaggtggatcggaatcgataatgtatggaacagtgatgggtagcataggggcattacatgctttcacatcccgtgatgatgtggatttcttctctcatctggagatgcacatgaggcaggagtatcctcctctctgcgggagagaccacatggcttacagatctgcatattttccggtcaaggtaataaaccaaaacccatttgcttttcctccaaatcaaaagaagtcccttgattttgaatttgacactttttgcatcttgtaacaggacgtgatagatggagatctgtgtgagcagttcccgacactcccaatggacttgcagaggaaaatagcagacgagctggatagaacacctgcggagattctgaagaagctcgaagacgcaaggaacaagatcatttgataacacacgaaaagagagagagagagtcattgttttgttgaaggacaaagtagagagtagagaagaaagaggttataatagattttgtaaagctcttcaatggtttgttaaacaaaaccccgctcttgtgaaaactgatgaattaattgcaagtttacttttgaatctacaacagcatgaaacagttgcaccggtaaggtttcttccatattcaggattcctagtagctatggtagttcttgattcgttcatgagaagcattgagaattgtgaagcagcagacaagtgggagcctcgcctgtctcaacaaaagatcaggaactgcagacgaagagatctgagttaattcagaggctcttaacaccagccattctcgttgagagcaaaaacaaagattgaggatgcaggtgagctaaatgaatcttctgcaacatcagacttaaaaagtacctggtaagatacaaaaacaaagaattatttcacattttctgtaatcaacatttatctctttgttaactttgttagctaaacatgaaacttttccttttccaaatctcaatcacaaattgattttcaacaaatccgatattatctgaatcccatattatctcaaattcgataaattttataaatcattatatacaccgtcttattacattcttataaataagagacaatataactaactaaactaactatatctcttacgaaacatacttttctttttgtcaaagctccaaagttacttgatgacgatgcctggaagaaacaagcgcaaagaaagatcctggccggaaccgcaaacgcaaccacagtcagagattccttcttgtcttctttggcagctgttaacatgtctcctccgtcgacgatagcttacgtattaccgccaggttttaagtttgtgccaaacgatgaagaagtcatccattgttacttgaaaccttactcggacggcaacacgaacgtattgctccatgttcctattcatctcgtcaatatctacgagtcgaatccacaaacactttcaggttaacttgtctccgtccatatgtattgtttacttagttgaattctttagtttattaagttattaacatatatctatatatatatatttttgaaacagaggaattccagaagggtaacgataaagaatggtttattataacggagaggaacaaagttgatcaaggtttaagccaaacaaagagagttggttatggtgcgaaaaggcagaaacgtgtcgacactaacggaggatattggcacgcaacagtggctgcccaaaagatcaacgctggagatggtgtcgttcgcaacaaaaggccactggcatactacgttgggaaaccatcagaaggcgtcaaaactgattggttaatgcaagaatactctcttgatcactcttctcacaacaacgacaaggtaagaagtgtttcttggttcccaagttatttaggttttcaagttttggattctgttttgagtcttgtttttgttgtgcgtctaggattacactttgtgcaagatctatcttactccacaagcaacaaagatgaataaagaagtgggagaagagaagaagaagcagaagaaaggagaagccgttgtttcagttgcacctgtggaagcattggaagagcagctgccttgtaatgtcgagtatcatcaaccgctagcaccgctagattcttgccaaccgcagcctcatgatttggcgtatcaacagcagcagttttgtccaggcccactggattcttatcaaccgcagcctcatgatatggagaatcagcaaccgcataatgagaagctgaagaaagaagaagacgttgagcagctggatttgcatcaaccagaccaaggaaaaggatgctaattgatctctttcctctatcggcaatgttctccaaaaccagagataattctccctgtctttattgcttttgatgccttgatataaaacatttatactcaatttgtccaacattttcttagcgtcttagacttataaactaacacatacagatatagatataaaacaccggtgtattccagtttcagattacccaaatataaaaaatttgtgttttgatttgtgggtgggttaaagattttcgttatataatacattagatcttaaaaccaacaaataagtttcttcaaagcctaactaaatatactctaaacaaagttgtagatttaaaggtaaatttggactttgttacatcagttttcacaagagcggggttttgtttaacaaaccattgaagagctttacaaaatctattataacctctttcttctctactctctactttgtccttcaacaaaacatttagctcacctgcatcctcaatctttgtttttgctctcaacgagaatggctggtgttaagagcctctgaattaactcagatctcttcgtctgcagttcctgatcttttgttgagacaggcgaggctcccacttgtctgctgcttcacaattctcaatgcttctcatgaacgaatcaagaactaccatagctactaggaatcctgaatatggaagaaaccttaccggtgcaactgtttcatgctgttgtagattcaaaagtaaacttgcaattaattcatcagttttcacaagagcggggttttgtttaacaaaccattgaagagctttacaaaatctattataacctctttcttctctactctctactttgtccttcaacaaaacaatgactctctctctctcttttcgtgtgttatcaaatgatcttgttccttgcgtcttcgagcttcttcagaatctccgcaggtgttctatccagctcgtctgctattttcctctgcaagtccattgggagtgtcgggaactgctcacacagatctccatctatcacgtcctgttacaagatgcaaaaagtgtcaaattcaaaatcaagggacttcttttgatttggaggaaaagcaaatgggttttggtttattaccttgaccggaaaatatgcagatctgtaagccatgtggtctctcccgcagagaggaggatactcctgcctcatgtgcatctccagatgagagaagaaatccacatcatcacgggatgtgaaagcatgtaatgcccctatgctacccatcactgttccatacattatcgattccgatccacctgggatcatcgaagctttctgcaagcacgtcacaacgtccccaacatggaactgtactatctcatccactttgttcggtgctccattcagctttccttgctcccacttgatcttcccgccagtcgggtcttcttctatctcctccgacagatcctgaggcaaccgcacaaaatacacattcccaaacttatctgcacctgccatggtatcgaaatccacatggtgcgatgctgtcagccacctcggcacgcagtcatccgcaaatatgtacagctgattctcgtcgcgcctgtacttgcagtaatggaaagactgcaaaacgataatgaaaaggctacatgagatatttctataaaacaaagcacacagtagtaagtaaaatatataggaaaaaggatctaccactcacctcctgaatgtcaccaacgtatatacggtcacggtaagtttggatagagataatggtgtttggaaagagcttgttttcacatttcctaagcagtctctttttccccaaatcatacaatctgaggacaggtccgatccctgccagcagtcttccttggaactggcacagagcaagaggaacaccttctacttgcgtcttatgaagaagctcaagagatttcccatcctccacaaacctataaatatgtatgaacccagccactagattcttcttgggccagaactgcatccctttgaccgtaccaacagccaacagtgtaccatactctttatcatggaaattcaccgtacagacactgtatgcagcttcgttgtcctgaagttccaggagacaagttgtcgtagctgtcttgggatcaagaactctgatgcaagagacccacttttcagactctgcttttggataaccgtactgctcatcagaaagcgggtcttccttatcttcatcatccgcaccattctccatctgatctgcattgccattgccattttctcccactccaccagcctcgaagcactcctttcttgcagcttcacgctcttctgcggtgaatgctccctggtcactctcgataataaccaacaacttccgcttgggatggagaacaaactttctaggcgtgtacctcagagggaccactgtttcgttgaatgtttcaccaagacgatcaatcataaaaattctcagagcatccccagcgacagagacaacaccttcagcgcactgatcagatgaaaagggggcagcaaattccagagtctcgtaagacagaggcgtcaaatggaagtgtccccggtgaatataaccaagccaaggtcggctagacaaacacagcattgcagaccggcctctcacagaaatggagaatagcttgggaggcttcagccccaagaaccgggagcgagaatccgaaagctgaccagtcaccatgtccaccacagttctgaaaagaacaccattctgcagcccagaattgaggaagagatttgccgggtgatcagcaccatcatctccaccaatcgatgcctgaacttcgaggaatagcagagactccggagctgaagagacactttgcacgctgagaatctgcagacagtcgtcaggatccagagatagaatgcgcacagtattatcataagatcccacagcaagaaagcgagacctttttcttccttcaggaacaggggcaatgtccaggcaagccacatcaccagacatttcatgcttctccacctccatcagctggccagtcatatctgcctcaaagtatataagctctcccccgctcaatgcaatgaccacttgaagccgattatacccaactttaacaattgacctcttgccaggagttctccattcgttaatgcgtccatcttcccttatgtggcggataccattgggatggacttgcatgagagaatcatcgccgatcagagagacagccagggatggggtagtatcaagaaacccactgtcattaacttcttcaacttgttcaccaatcgaaagaacaagagtagcattggtaaaagagacaacgatgtatgcatcaaactcatcgctcacattctttttcaccgtccacacagcacttggctgacctggaagctgagagacagccatctcagtgatggccaaaccaggtctcagtatccttagagaggatcgtggaccccggccgcaaagtgaaaagatttgaggggtttcttcctcaaaaatgtttaggactttcatgtccatgagcggcatcagactctcgacttggtcaatcctaacaagattcttaagtcgtctaggctgaaaaaagacgggctgaaaaccttcttcggtttccatcagattagaggaggaagactctacatcaggttcctctcctatggcctgaaactgatacaaaccatggtttccaaattccgaagcagagaagaggaatcccagcttcaacacacatatagaggatgcgacgggaatggtgtcgaagtatttaaccttcaactcggagacatgatcgccattgtgatccaaggtgaccttaaaaacgtcgccatactcagtctggattaaaaagaagaacattgtcttctgcttgtgcacggcggcagaaacaaccaaaactccccgttcagcaggcaaatcagttcgtctaggaatcacagccctcacgtctggatgaccctgattcatgtaaataacaaaattctcggcgcaaaccaaaactccactcgggccatcagctcctccaggaacagtaacaagcatattggcaccattgtcaacagggttagaccactttctagagacatggttgagccccaaatcgagctcatagaaagtcaaatgcttctgagcctcactagcggcttggccagtaggatcctgatctgcctcggagtaatcaagctcaatggctgcaaaaatcgggttatcgaaaccgcagtccacaccgcagagagaatagcaaatggtatgagacttgtgagcctccaagggagaagaaatagttaacctagcagtggtatctctgttcaaaacataaaccaatttctgcttctcacaagctccaatcataacagctcttcctttgggatcaacagccacgtactggcctggcacaattcttctgcaaccagacttgccaaaagtctcctggtgaactttatcgaacacattcttctccttgttgtactcaagtataacaatcctacccgaatctgagcctactacgatataatccttctgcgcaccagtcaacctaaactgagctagggatctaattgcaccaaatacttctacagagtgtatcgtctggatcttaccgttctcgtcgggacggagaagatccaaaatcttgccacgagctaccgcaatctcctgtgtcttcccgccggagaagttcccgttgattgcgcagacgattccggtcgcctgctgcagagtaagactgtacagatacatctctcaaactagcaagctacaaccaccagcaacggctaggatttaggagaatccccgaaactggaaggacttgaggatggttttggctccgagtttaagtgaactcctagcgcatctgcaacttcggatttggcagattttggtgaggaacggaaagaataaaccctatataatgaattaccgccatagctccaaagctctacgacggaagtggtgttcctctgctaggcggtgattcaatcatgggcctaacttttggatctaatatagcaatattggcccatcttattttagatttaagcccaaataatgacaagagtccaagactggttttgtctccgattatcatttttcattaacaaaaattgattacaagaaattgaacttttttttttggtggaaacaagaaattgaacttaatataaagataaactatagaatgacaacattttctctcattaaatttgtgaagtcacaaaaatagagtggtattgcataattatgtgattggttaatattgcaaatataattatgttacttatgtatgaaattaacatggctaattaagatctctcttccatttaatttcttaacatgatttattctaatttctaacgaatagatagaaagaaacaaaaataggtcaaagaaatcaagaaggctagaagaagcaagaggagtaagtagcaaattaaaatgaataaaacctagaggtttagttaaatccattaatcaactagagtatgagaatgcaacgacaataacaacaacaacaactccactccatgatctcatcatcctccgcgcttcctatataaacaaacccattagccttagaaaataaacacaaacctaaaaccaaaacaaaaagaaagaacaatggccaaagctcttagccttacaatctttctctttctcttgatagcttccaatgtccaatccgctcgacttctcgatgaggttcaaactcagccacaattagtcccccaggtaccggaagaggaagatgatagtccacaagccgtaacaacaactccaacaccaattcctctcccaggacccgccacgggaggacccgagccaatcctagagttctttatgcatgacgtgctaggcgggtcacacccatcagcacgtgtggttacagggatagtagcacaaacagaggtgaatggaataccgttttctaaatccagcaacaacattttcccagtagataacgcagtgccgcttgtgaacgcaaacagcatcaacaacttaatcaatccaaacacagctccactcctaacaggacttagtggctctcaagccaacaccgtaatccaaaacagtaacggtaactctcaaggatcccttagctccaacaaccttccctttgtaaccacgggtcagctccctcccatagctgccctccaacagcttatgtttggctctatcaccgtggttgacgatgagctcaccgagggccatgagttgggctctgcgatcattgggagagcccaagggttttatctcgctagctctttggatggaactagccagaccctttcgttgacagtgttactccacgaagatcatgatcatcatgacacccttgatgatgccatcagcttctttggggttcaccgaaccgcttctcatgcgtcgcatatcgctgttgtgggtggaactgggagattcgagcatgctaaagggtatgctgtcgtggagactctacacaaccaggaagaccaacatgttactgatggtcatgataccattctccatttcagtgtttatcttacatactacaaagcttgaagagttatggcatttgttgaaagaaaattcctctgtttcgtttgtatgttcttctttataagtttaatgtgtggtctatattgtgttgtgcacgtttactgtactgaaaaaaagaaagttaaatgacaatctttgtctttaattctttatattcaaaactctctgttttttggcaaatacataccttttgcatttcaaccggtctatttattcgtttgtatatactatatactctcgaaattccatttttatatcaagttaacgtaagaataaatcctttttataattttttgtttacttaccaacaaaaagaaagaattattacataggagccatgtagtctagatttacgtgggctggaaattgaaacgtgttactactcttgtgagtagtcactcacttaacaacgcatgttaagtgagagttttcttatgaactttgacccaaaaagacatttctgcacaaggtataacaaattaacaacgttcaagttatgggctgatcataggatcggacacattttgaccacttaatcgcaaattaattggatattgttcaagaactttttctccatgttattgtttttgtttaattaatgtaaattttcaatttgaagaaatttctattaaaaacaaaaatggctgcatagacgttccccaaaaaaaaaacagccgatcatggaccaaaaaacagctgatcaacgtttttactgatctggctaaaatctggacttttgggttccgaaacttgcaagcatatggaaaccatgatacaaaatttccaagagtgctaaagccttttaaggtgaccaaaacccgaaataaatagtttatttgaaaatatatacacacgatacattcaattaaaacaccacaccatcgatccatgtatgagctagcgtccgtttcattatatataattaaacagaggcaatattatgtggaccacgtacgtataacgtaccaaaaagagtgtcatcactcctttttttgctgtcttgcttgttggaccgatgctaagatgaaaaaacgatttacttataaacatgcatgcgtcagggataaatcgttttcatgagattcatatatataaactataaggttttcgaaatctaacgatcgaacatcgcgatcagtcgtcggattctttagatgaatccgagataatcttctggatcatctggtttgtctcttcctccgacatttgctcttgtttgctttgcctctcctcatacgccttgaagaattccttgttctctttctccagctccttccacactgtcatttattttgttccaattcattaatattatgataacaaaatatataggccggatatatatgttgcaaggatttttatattttctttggctttttttgtatatgtataagttctagtcgccaggtagtcaagtcagtgtatataatcattaatttgattatgcatgagcacttatatgaatagaaatattgaagatcgatccatcacgctagatcctatctgtagctaattaagtacatattacatgatcaaattctaaatgatggtatcataatatgatgatagctccataatttatacatataattaatcccgttagagagtacataggtacagatatgtttgtgtgtttataaggattacggaaaggtaaaaagtattaaaaaagaggagagagagagagaggaattaaaaccagtagaggtgatgacaggagtgatgtttgcatgcttagagagagcttccacacactcttctttgctcatatggaagatcaaacatttctctatcatgtgctgcacctatacatacatacacacatccaaagatattgaggtacatacgtaaaagataaatagataagatcattcatagaatcgacggccggagaagtacatgaggttcttgaatcaatataatattaccatgtgaatgtaagaagcagaagaagaatctgccattgttaatggaaaccctagaattaacacccaaacttaaaagagagtcttctttctaaaagccacttgtggagataaagacagccatatatagaagaagatcacgcaaaaagatgaagaaggagacaaaagagtgaatagttgaaagatgatatgcatgcatggggccagaagccccacgtgggagattgatcataattggctgagaaaggattagaggagatttgtaaaatcactctttctctcttctcccttcgttttttcatttccatctcacgcatcctccacgtgatccatggcccctctctctctatacattttctgcaaaaaaacacttagtcgtgttttaatttccataatcttctagaaattaaatctatacctatttgttaatgttttaacttatataagaaaatgaaagttagttgtattggctctaagagcacatgattacataaaaggagagtaaacgataaattcggaattttaaaggattgatactttaaaaaatggcaaataaaataatgacttcaacaattgtaactcaccgaattccttttgaaacaatataaaaccatagtgcgaaatatacaaggcatataatcataagtcttaacacttatgttaaggcttaccattaataaagaaaagataactgttgtaacaaacatatcaaatgtatatctacgatgactaccgttgtgtgaccatcgatttgacaattgaaatatcataagaagacgtattagaggcctaggtcgcccctgaacatcggtacgtctactcttaaggtgaggcaagagaggcatgaacttgttttcctttttctttttctttttgttaaaggaatgttgaacttgtttaaatagggaataccatgcatataaaatatataactggtaagttgattgataagaacatttgaaatcacttgagcactttaagaaaaggagaagtgaagaaatatgcggatgagatccaaacgtggtttgcatcgagcaacattaaggatagaaaatctttgtaatttgttttttaaaaagtttgcattttgcattcacatgtataaatgtttcttttttctttgaatataatctagattcaaaaaagttataatatatatatatatatatatatatatatatatatattgtaactacatattatgagtatgagataatccatatacattagtaaacctctgtcgtaaaaagaaccaacgtaatttacacgacatgttatagataaatgtttgctactgaatttttcagttctgtcatatatgtatgagcctcctcctaattaagtcctaactcttaaccatgcataccaacatgtttattaatattaagaccggtaaaagaaacccagaaattatcatgtacttgttaatgtagcataaaagacaaaatcccactccatctcataaatgataatattgatatggattagtggaacctattacatctaataaacattacatctgacgtaagttacacagttgattttgtttttttataattagttttttgaagttacgctattgaaatttctgtctaatgattaacttagttctttttcttctgaaatttttgttatttatgaatgacacaaacccccgaaaaagttgattacaccaaccaaatgtcgtcgatctcttccagataatattcataatttaatcatctacgtaattgactcctcaaagtattaatttgggtatagtcgtaccaccatgacaagtgtagtatacgttacaataatggacggccaaaaaaaaggcaaagtgatcatcaatagttttttggttgggtaaggggacgcgggagattaaagtttttgattctaaaccaataggacgatgacatgtcacgtataacaatccacattgagatcaaataatcgcaaatggtacaaccatctgagtgacgtggcgcaaatggacatgagagagagtgagagaatctacaaaggttacgtaaagaagtgagagacaaacacattgtgggtgttttgtcgaaatcaaaggtttcagaaggatccatcaaattcagacattaaataaaactacacatattcctcatcatgtggacctctcaatttgagtcctgaaacagcaactattccctcgaatcaaattcaaaccctattcatgatcactttctctctcattccctctcctcgtcaacaagattacaaaccaagacgcctattctctctcatccacttatttcttttacctaagatacttccttatccagctcttaagatcatgctatcaaagttcattcgaatccgtatgagtgattatgtagttataatgagcgtatatttcatttataaggaatttgaaaacggtttatgtgttacaagaaaatagtgtatgtattgtaacgagtaacgtatatattacataaaaattactacggagtttactctattttcttctgtctgttcattgttctattttctctgtgttcatacttatattcttttggcttagagataatcatatacgtatagtataccggattttacttctaaagcgcattcagttaaatatgaactttcagtttttaacttttctaccaaataaattaaggcacatcataactactttccatggttattatgcttggtatcttgtggtcgtggaagctgagtcttacatgacttcatatagttattttctttcttttttctaaatcagctattagatactggtgtaatttatggttattctcttgcaactatattcataatttagcaaagagactatatattattcatggatcacattttgtccaaattgacaaagccatcaagaattattgattaccctacccatattgaatgtctatcgttcgatttttctcaagaatgaaactttggtggggtttctgattaatactagtaagtcattaagaggttcgaaataatatcacagaagacgagacagcagaaagacgagacagtgcaaaaagagacaaaggtggtgcagtagactcactattattattgccttaactcaattttcaaaccaaaagctctcagaaagcaaacccacatttgtcccatggacaagtggagattctattgaccacacccactccacttgatttttcctattctctaaagccaaattgctccaaaaaaaaatctttaaatttttgggttaaagtgtacgatgtgattgaatttctgttatccaatgagatcatgccgtgtcagcataacggaatatgtttgttgtattttttcctttgagccaaaacaagtgatcagagacgtaatgatattataggggcatctagctacgtattggattatgaatactttaggtgtcttgattttttctgtctaataaatctaagctagttggttggcccaattagatcacgattggaatcgaaagtttcgtttcgattactttgtatcaagtatcaaccgattaaatgatatttattgctcaagttagcaaatactcaaatgttttactaaacgctcgagtttggttgaaagcacaaaaaaaaacaaaaaactcaccatgttgtacaatacacaaattgttcaagctacgaaacaaaactacaactttatccgggtccattcatagagtggatccaaactttaggttataattcgatatttggacaatttaggaaagccttatactattttgaagatcttggtctgcctcaacttaggattccttatttctctgtatatattttttttcatatcaagattagacattgtgaacaagtataaactgtccgtggacaacaatatttggacgtttcaatttcaacgcttctcaatgctgcaaatattgaagtatcaaacgtccgttgttcaataacgatgatattattattatcattcaagtcttcaaatgttttgccgtgtgttacatagaatatgatgaatttagctaatacaatgtatctgttttttttggacaaatacaatgtatcttatcctcgacattttcgtgcttatgcacacacacggttaatacatactacttttgtgtggcattcggtttcttaaataatcaaatactagatgtatttttctaagaaaaatcaaactatttcttaaatatgtataaatttttggctatatataatataagatacaaatatgaaatatcgcttgccgccacaaaagaaaaaatatcaccaaatttttggctatccttcttcttttcacgatatcgttaaaagtgggctttacaaaattgtcataggcctataagtaagcccagtatgagtatttcgcttcttcttttttccttttcctttcagatctgctagcattatccagtatttgttcttgtctgaaattctgattaatttgctaacaaagacttataaataatgattttgacttaggatcttcacggttaattttctaatcaacaaaaataaccaggtaaattaagaaaaattacatatgaaattagtcactcactagtaaactaaaaattatggaagaattaaaaaaacataataaaatatagaatggagaagataacgtatataaagatgagattcatccaaacagcataaagagaagcttccatatatcacagccatggtggttgtcactcacatctccacttccttccaccaaatctctccttccttcttccatctccgtcttcgtaatccctccaccacttcttcgtctcgtcccaaactcgacggtggtttcgctttgtcaattcgagcttacatagagaaaccaaactctttctccaccttcgctaacaaagtcatcggttctcttcccgttatcggactcctcgctcgaattatcagcgatgaaggcggcgttggtagagatctcgtcgatttcgctgagtttaggaaacgagttgggaataaatgtactcctgatgattctagggctttctatgagttccaacagcgacgaggcaaggtaaaagttctgattttgagcttagattcatgaaattgaattgttgggttttttgttaatgtgtgatcagtgttgaattatagccttgttgttgctctgttttgttgttaggcaggtgagcctttgtatgtgcttctgtgttgttgggttgctgcagtaggtgcaggtcttctcaaatctgaagagattcttgaaggtgttactagagttagcatttccaatgatctcgagtttgaagaacagaacttcattgctttgatgactgaagctagacaggtttgttctggtatttggttcaagtactaaatgtcactcatgtgtcagaaaggttgatacttttgttgggttatacagagaagagcaaagttgaacattgatgcgccaacaataccgatggaactaagagttgaaaaggctcttgaaggtatttatgcttgttgctttcggagaggacttattgaagaggaggatgagaagcttcttaaagtgatgttaatagcggttttcccatcggttgagaagtctgagatagagagaatcatcaaagagaaggcgacaagggttgaggaaggaggagaggaagagaatgttatggcgaaacggttgcctaaagaagctattcaaatgcagatgaaggatcttgaattccttcaacaacaaaacatagagtcttaacaatagaggttgagatgccaaaacatgtttactttttcagtacggattattttaaaaaatgcaatcaacttttttcagtcatgagcaagtaattgttactgcataggtttcgagatatggttgcttcctatcatatcttttgagaacttggattgattcattcagttttttagatggtgtttgccgtatggtagatgtgtgaatttgctccagtacattggaacaacatttgaaactataggtaatagagttataaacttagttttcaataagatgtttttgtaagacattaaaataatatagtccatctaaaaaaaaaggatgagtttgctaatatgaatatgtaaaaacttcaaataaagaaagcttctaagcattcaaacattagaaaaggtattattatattcaatcaattttgatggttacatttgtttgataagatatagtgataacaataattttctttttgcttttctacgctccatcctcccattcgaaacagtatggattgtttttcttctcacgagaaatacgacaaataggggttacatcgtcttgtcctacttcccatatacattctttacaaatcggaagttctccaactggactatcatctcttgatgctttaaatatataaaaataatgagatccaccattatgccacgtaaaatgacaacgaaatttcgtagttttaaaaaagttaacataaaatctgaaaccccatgcaccattccaaggaatatgtttaagcccaaaatcatcttcactagatctgcaatgtacattcaaaatttctctattttttaacttgttgcggattacaacatgtttttcgcttagaggtaacaagccatcgccgcccgaagttggtgcttccgctggagcatcagaaagaactaatgcagacacaaaaagaataagagtataatagatcatacacaacattataaaatgaggtttacttgtgaaagccatggttaagtaaattatgtaggagtgttgttagataaaacttataagttctctatttatagatgtaacaaattgtaaatatatttaacagtgagagtgactaaacatcatgtaacgtataatgcatgtatttagtctatgttagtattcaaagttgtagattcatgcctaaatttatattgtttccttggaagtttacaaatttactaattttaaaatatgaattatatatcatttttgataagaattatgattcggaatgtgtcttatatattataatttacaatacatggaaataaatcaatctatttgactgtcgaaacgagaatttttttttttttgattgtgactttgactttctaaaactactaaaatccaaaaccttattttgtaggtttagaaagtttttcttttgcaaccaatggacatggtgaattttcctaatgatctctgtatcgattcgattttgttttatgagaatatcaaactagctctaatgagggttaccgtggtattatatcaatcaatgattattctgatactaattagagaacaagaaagattttgaatcaaaacttgtacaagtaagagataaacgtgcaagatttattacgattttagaggaacttatattctgggaaatggatcataatataccattaaattttaaaggccatttcacgaaatatctcaaaaatcatatagagaatcaagactcatgactcaggagtgttacttagtaatgtaagttcacaacgtaaacgagagataatcgtaggatttatatggttctacaatataatgaatagtataacccatctaattttctttttagtttgcttatgtgtatacataacaacttcacataaagaaagcttataagcattcaaacattcgaacattataaatggtattatatttattcaatcattctcatggttacatttatttgataaattatagtgataacaaaaacttttttttttcttcttaaggaccatctttccatttaaaacagtaaggcaaatgtctcccatcacgaacaatacgacaaatatggccgttatcaccatattttcctacttcccatatacattctttacaaactggaaaacgtccatctggattatcatctttgtatactttaaaaatattaaagtaatgagatccgccattatgccaagtaaagtgacaacgaaatttggtatttttccaaaagttgacgtgaaagctgaaatcccatgtaccattccaaggaatatggaccatcccaaaatcatgttcactggatctgcaatgtacattcaaaatttctctattttttaccacattgcggattacaacatgttttttggctagaggtaagaaaccgtcagcacccgaacttggtgattctgcgggagcattaagaaaatctaaagcagacacaaaaagaattaaagtagaaaagatcataaataacattagaaaatgagatttattattaaaagtcatgactaggtaaattatgtaggtgtggttagatagaacttagagacaccctatttatagatataagaacatgtcaatatatttgagagtgaaggtgactaacattcatgtaacgttgaatacatgtacttactccatattagtattcaacgatataaattttttttttttccttttgagttatagatttattagttttaataagaaataaatacgtgtttggtaaaaaatattttcggttatgtcttatatattataactagatcataacccgtgctatacagcacgggcattaatattttttataaattaaattgtatactttgtttgaattacacaagaaatagtatagtataaaaatgatgtcataatatttttcaatgtttgtactatttgcatataatgctgcattatattgaatttgtttaaaaatgttacttttataataaatacaacatatgtagttttaagtaaatgtgtaaaatttgtatacaagttgttttggtaagaaacatgttttctttgtattagaggatataatttttggcctaacttagaattagtctttgtatagcattttggttatatcggtggacctaattggagcctatattagattatctttaatagagctaacgaaagaacggacccgataaccaatctaatacccgaaccaaaaaatcgggttaaggcgggttaaaattttaggaaatttccttattaggtagagttttagtaaatccgtagatatccgattggtccgtaaattacccattacccaaaaagagtattcaaaaacccaaacattaatttaatatccaaaatattaattatatttaatcgtaatattatctaattatctaagattataattataaatctaaatatatcaattaattttggacctaaatatccaaaacaactaaactattcaaaaattatttgttatgtttgtgaaaatttagtaaaatatattcaaatataattaaatttattaaaacttaacaaatttaaaagttttttttgtttggagacccgctatctacatacaaatttctcgtttctattttttttggtatttttagagtctgaaacgttttgtgcaaactgacccaaacccaactggatcctatccgaaccagaaccgaatatttagaattattctattaggtagtaaatcatatacccattaatcccaaatccgaacgggttctacccgaactcgaatgggttactcatatgcccaaccttattctctgatttaattatctaaaaactcccaaaaaaaacatatgttttgctgactactttttattccaaaaaatttacatcctcttctgccaaaatcatttcataagacatcccaaaacccttggaataatgattccatgaatgaagaatcctaatttgaatataccaagaggttttgaaaggttttaagttttttataggtgtgtatgtgagaaggtacagacaccgtgatggtaatctgcttatttataattttaacttgcagtataccgcaggtaggcttatattttagttaaactaaaaacttttattgtaaagatgattataaatatatgatattattttatttgattttaaatgtatagtaaactgcgagttgtatatgttttgttgatattatttatattgtttagtgtttaaaattatacacttgtattttgattgttaattttagagtttaacttgtagtataccatcttgtattaatatcgatttaaacccgtcaattctaggattttccagcttgtattaaaaattaaatcacatcatacacataaaaaaaatataatatgttattaattattgtaatatataagattataaattttaaaaataatatgtatgaaattgaatataaatattcaaattatgactcagtactcagtagaaaattttcttaaatctatttttgacccgttataatatttttcatgtattgaacagtttatattcttttttaaaatttaaattatgtcatatgagaaaaaaatctaattattttttataacgataatattattttttgcaaaaatagaatcatataaagatgagaggtgaactataataattaataaaaaaattaatatgataatttagatatcaaatctaatttgttgattttaattgtttactttttagaaattaataatgtatttcgttttttaattaaatttaattaattaaattagtatttgactttttaatttttaaagagatgaattaatttactctttaaattttatttctaatggcatacctatgtaattacttacaaaaaataaggttacatttaaaatgtactttccaaataatatagtaggatttacaatatttggaaaaataattaatttttttgactgtcgcaaaaaaaataataatatctttttgatgttttcactttgtaaaactattaaagatcgcaaagtcttatttttaataatttacttaagacccatgaatttgtttagtttacacaaaacacaaattaactgatttgggtgaaaagatgacaaatatattcaacggacttcgtaaaatgggctttgcagttgggcttcacacattcgttcttcgaccttttatcagtccgatcaacttatatataaaagaacatcaaatcagcttttgctaatgagaattatcatatggtaattaatgtatcaatcaatgcacaaaagactttgaattcatcggaattaaacacacacaccttagtaagagttaagaatatgtttccaccgaactaacagaaacatgatactaacagaaactcaagttggttgttcgtgtaataaaatcaaaactagatcataatccgtgctagcacgggcattaatattttgtataaattaaattatatactttgtttgaattatataggaaatattatagtacaaaagtgatactataatatttttcaatatttttactatttggatataatgctgcattggattgactttgtttaaaaatgttatttttatactaaatacaacatatgtacttttaagtaaatgagtaaaatttgtatacaatttgttttggtaagaaacaagttttctttgtattagaggatctaatttttggcctaacttagaattagtctttcagttatatttgtggacctaattgggccctatattaaattatttttgatagggctgacgaaaaacggacccgataaccaacccaatacccaaaccaaaaaacggggttagggcgggtttaaattttaggaaattttcttattgggtagagttttaataaacccgtggatatccgattggttcagaaattacccgttacccaaaaagggtattcaaaaacccaaacattaatttaatatccaaaatattaattatatttaatcgtaatatttagattataattataaatctaaatatgtcaattaattttggacctaaatattcaaaacaactaaactattcaaaaattatttgttatgtttgtcaaaatttagtaaaatatattcaaatataattaaatttattaaaacttaacaaatttaaaagttttttttgtttggagacccgctatctacatacaaaatacccgtttctaatttttgggtatttttacggcctgaaactttttatccaaactgacccaaacccacctggacccgacccgaaccagaaccgaatatttagaattattctattgggtagtaaatcatataccattaatcctaaacctgaacgggttctacccgaactcgaatgggttactcatatgtccagccctattctctgatttaattatctaaaaactcccaaaaaaaacatatgtttcgctaattactttttattcgaaattttttgcatcctcttctgccaaaatcattatataaaacatcccaaaacccttggaataatgattccataaatgaaaatctatttttgacccgttataatatttttcatgtattgaacagtttatattcgtttgaaaaaaattcaaattatagcatatgcgaaaaaactctaattattttttataacgatgatattatttttcgcaaaaacagaatcatttaaagatgagaggtgaactataataattaataaaaaattaatatgataatttagatatcaaatctaatttgttgattgtaattggttacttttaaaaattaccaatgtatttcgttttttaattaattaaattagtatttgactttttaattcttaaagagatgaattaatttactttttaaagtattacttctaatggcatacctatgtacttacttacaaaaaataaggttacatttaaaatgtacttcccaaataatatagtaggattgaatctttcgactaaaaaaaggttctatcttcttcttcttctccttatgtgacaagaacgaacaatcctccattgacccaaatttcgaaaatgtcaacgaatctttttcgtcttattctcgtattcatcactttatctatcgcttcatctctgtcaactccgtcgccggctgattctcctccttatctatggccgttaccggcggagttttcgttcggaaacgaaacgctctcggtggatcccgccgtgactctaatcgtagctggaaatggtggtggatctccgattgttagagctgcgtttgtacaaacaggagataaacgtgcatgatttaatatgattttagaggaacttatgttctaggaaatagacccaaagataccatcaaattttaaagaccatttcacgagatatctcaaaagtcaaaagactgtctatacgtacgttagggacttatgtctcttcgttttggaaaacaagacattattatcttctctaagcacatcatgcaaacttagtataatcttcttatgatgtagaatcaggactcatgactcatgagtgttacttagtaatgtaagttcacaacgtaagcgagagataatcgtaggatttatatggttctacaatataatgaatagtataacccatctaattttctttttagtttgcttatgtgtatacataacaacttcacataaagaaagcttataagcattcaaacattcgaacattataaatggtattatatttattcaatcattctcatggttacatttatttgataaattatagtgataacaaaaactttttttcttcttcttaaggaccatcttcccatttaaaacagtaaggcaaatgtctcccatcacgatcaatacgacaaatatggccgttatcaccatattttcctacttcccatatacattttttacaaactggaaaacgtccatctggattatcatctctgtatactttaaaaatattaaagtaatgagatccgtcattatgtcaagtaaagtgacaacgaaatttggtatttttccaaaagttgacgtgaaagctgaaatcccatgtaccattccaaggaatatggaccatcccaaagtcatcttcactcgatctgcaatgtacattcaaaatttctctattttttaccacattgcggattacaacatgttttttggctagaggtaagtagtcgtcagggtccgaacttggtacttctacgggagcattagaaaaattcaatgcagacacaaaaagaataagaatagaaaagatcataaataacattggaaaatgagatttattattaaaagtcataactaggtaaattatgtaggtgtggttagatagaacttagagacaccctatttatagagataagaacatgtcaatatatttgagagtgaagttgactaacattcatgtaacgttaaatacatgtacttactctatgttagtattcaactcaacgacataattttttttttttccttttgagttatagatttattagttttaataagaaataaatatgtgtttggtaaaaaatatttttagttatgttttatatattataatctacaatatttggaaaaatagttaatcattttttgactgtcacataaaaagaaaaaatctttttgatgctttgactttgtaaaactattaaaagatctcaaagtcttatttttattaaatttacataagacccatgaaattgtttagtttacacaaaacacaaattaactggtctgggtgaaaagatgataaatatattaaacagacttcgtaaaatgggctttgcagttgggctttatacgttcgttcttcgaccctttatgaatccgatcaacttgtatataaaagaacatcaaatcagcttttgctagtgagaaatatcatatggtaattaatgtatcaatcaatgcacattctgatactaatcagaacacaaaagattttgaattcatcggaactaaacacacacaccttagtaagagttaagaaatatgtttccaccgaactaacagaaacatgataccaactcaagttggttgttcgtgtaataaataaaaattgaatctttcgactaaaacaaagtttatcttcttcttcttcttatgtgacaagaacgaacaatcctccattgacccaaatttcgaaaatgtcaacgaatcttcttcgtcttattctcctattcatcactttatctatcacttcatctctgtcaactccgtcgccggctgattctcctccttatctatggccgttaccggcggagttttcgttcggaaacgaaacgctctcggtggatcccaccgtgactctaatcgtagctggaaatggcggtggatctctgattattagagctgcgtttgataggtatatgggtataatctttaaacacgcttctggtagaggttctctattgtcgaggattagatttctgaaaatggttgagtatgatatcacttctttgaagatcgttgttcattctgattctgaggaggtaaaaaccaaaactttgattccttcaattggaaagtttcaatcttttaggagctgatagcggcaaatagttaaattggtttgttttctgttgaatttcagcttcaattgggtgtggatgagagttatacattgatggtgtcgaagaagaacgagcaatcgattgttggagcagccacgatcgaggttttacttttgctactatagcttcttcatatgaggaatgtgtttgtgggaatcttataggttattgtttcttgtggtttcaggctaatacagtttatggtgcacttagaggattggaggtgtgtaacttaatagtatagtttgaagactatgttgagtgttaatttgatcatgattcgtgagccttgaattgtttcatcgagttgtagttcacgagtgttatggaatctttgctaatttgtgttgtttcttaaatttgtttgcagacatttagccagttgtgtgcctttgattatataaccaaatctgtgcaaatatataaagcaccatggtatattcaagataaacctagatttggataccgcggtctgctgataggtaataagtccgtatctctttctctcatttgctttcttgtccatcacatggaaagagaatgtaatcatgtgctggctattacttactacttgttccatttgcagatacatcaagacattatttaccaattgatgttattaagcaaataatcgaatccatgtcctttgccaaacttgtaagcttacatgcttgttttttgaggatacagaaagttaaactttctttcaagatttatctgatatctaatttcttcccttctgtttcacatgggcggttattgtgaggtagaatgtcctgcattggcacattgtagacgagcaatcatttcctcttgaaactcctacatatcctaatttgtggaaaggagcttattcgagatgggaacgttatacagttgaggatgcctctgagattgtcaggtaatcgcttgaagccttgaagttttttatgttagagaagtatcttatttattccaaccctccatgatcatttgatcatcaactattcttttacttactaatatgtgttttttttcctttttgtgtttcacggcctgtttttgatttccactgtgaaggtttgccaaaatgagaggtacttatttattaaatatggagcctaacatgatttttatgtcaagcaattctgaatggtttaagctgagaatgctttaacagatttctattttaacgacctgcttctcatggttgagagattgattacaggtattaatgtcatggctgaagtagatgtccctggccatgcggaatcgtggtaagattaggaagaatttgaaattgttcctctcttaatgtcacactattgatagtcaagattgtaatatcccagtagcataggaccatacctttctaagatttgaaaaacacacaaatgtggatatactttgtgttactatactcctaatgcttagaggaagtcatggtgtaagggtttaagttagcattttcttcatggtcatgttttttggggtattttatagttttcactttgattactgatacaactatcctctttgagcgtaaggtttgtttccaatgcaggggaactggataccctgatctttggccgtctctgtcttgccgagagccccttgatgttactaaaaactttacattcgatgtgatttctggcattttagcaggtctagttcaagtagtgtacacatttgaagcatagctccttttctagtgttcgaatccaattagtattcaatcttgtaaaggaaaagttaagcttatagagatccggtaaaaggttattaggaaatgtattgcatcttaaattgtgtattattatctgtatgtcctatttagattctcatattttctcttgtatcttggtttgtaacagatatgagaaagatattcccatttgagcttttccacttgggtggtgatgaagttaatacaggttagttgtttaacacctgaaatccctgcttccatttctcatttgtgtttgcatctcttaagttcttcactagtcggtctcttgtctggcagattgctggaaaaacacaactcatgttaaagaatggtacactcatgactctcccactgttatcttgttgatcattatatgagctaatactatttgagttagttaattgatatgaaaactcttgcttctttatcaccttttgcttgatatgttcatcattctcaactgcaggcttcagggtcgcaacttcacgactaaggacgcatataaatactttgtactccgagcgcaacagatagctatatcgaaaaattggacacctgtcaactggtacaatctttgacaaagattgcattatctgtcaagttctctagttcctttaacaaactgttgcaaagggtttcagttctatattctcttgttgtttggctttgaagaccaaaagattgacacgaatactatgtaataatcccagggaagaaaccttcagttcctttggaaaagatcttgatccgcggactgtgattcaaaactggtaagatcatacagtaccatagaaaaacagaaatcttcgtctcttgtcatagtttttttttcattatataggtcaaatctgctcactaaatctcgttgcaggctagtgtctgatatatgtcaaaaagcagtagcaaaaggattcaggtgcattttcagtaaccaaggatattggtacctcgaccatttagatgttccgtgggaagaggtttataacaccgagcctctaaatggaatcgaggatccttctctccaaaagcttgtcatcggaggagaagtttgcatgtggggtgaaacagctgatacatccgttgtccttcagaccatttggcctcgtgctgcagcagctgcaggtaactctacatgatcttttattttgtctcagtttggatttggtttagttttgcttaaacgctcacctctactgttgatatttcctaaaccgttatcgttggtgaaacagaacggatgtggagcaccagagaggccgtgtcaaaggggaacataacgttaaccgcattgccacgtctacactacttcagatgtctactgaataaccgtggcgttccagcggctccagtggataacttttacgcacgaagaccccccttgggacctggctcttgctatgctcagtgatccaaaacgtttcttctcattgtactatatgtaatgtctcgtctgaaatctggttgtcacgttgctttttctgttctaaattgtgtgcttctcaatttactcaaatcatgacaacatctgaaattacgatctaaaacacacgacgctcttaccacattgttaattagtaaaaaacatttgactttgtagacataaggaaaaaagattcctcactattgtaatatttgtttctcgaccggtcctatatactattacataatgttgaaatatgaactagcaaaacgacatgattattaatctcatatcagaatatgtaatattttatagtggtaaaagatagctagatcacgttgaattgttttggtgtttttacgtatgctttcgtgtgtatcgtgttctaactttagaaaacgataaaagttttaaacagtgtagtttcgtatgaaaacaaacgttctattttactatatacatcaacgtaaatattaagctcaaatacgaacttagtcaagtcccatattcagccgtgacgtttttgttaaatattgatagtagcaagctatactttttcttagtattaaatgattttcgtagagacatctctatagcattgtggaaagaaaaaatatataatatataattgcattgacgacgacgtgtaggttacaattattgaccaaagaagaacatcatctatagcgactgcgtccttaaattctcaagaaaatccaacgttagattattatcacattaaaattatctggtctagcttgactagttccactcttatcttttctaacaaacaatttcatgagtaatttactaattctctttccaatagtttaaagtcgttgattccatgcataggattgtgcgtggttcaaggtggtgttattttcagtattagaaaagaggcttctagagagagtttctaaattatattttgaacacggccggattggttgtcttatgattaagtgaatgctttagatctggtgacgattggtatatgagatatatagtagaatgatagaacatcagaaatactataagtcaccatatttttaaaaaataaatgctatagaatttttgttttggtaattgttataactctacaaagttatgtgttatagagttttactagtttcatcgttatcatgtgtatagtataacacaacaaaagaaattttaaatatctgaaaacataaaaatttaataaaatgatgtgagtataagaaaaaaagaaagaaagaaacacgtaaaaaataaaaatcatcatacatataacaattttcaaaagatcaatgttactttaattagtcttttttcttatgtttcatgcaaatgcaatagtattacttttctttaatctaagattatgtgttgcttttaagcaagaactattcaaagagtcaaagacatgcatgtaaactttagagaacgggatctttcatcaatcttatttttttcccttttttttttacaacgaacgataggtagtaagcatgaatctggttcaaagtttggatcagtgtgggcataatcctggttcgctaaaaagaatcaatataatatatgttgagcgtaagagaagaaagctcatagttctgtgtagaaaaaacgtggagattggagagaaattactaagagagcgaagagaagagtaaacctagaagatacaaaagacgctatcaaaagattgttttatgtgtttatgaaacattcacttaggccagtataaatattaaatgtcattttgagaaagaaaaaaaaatggtgtcattttgaggatataaatattttctcaacaagatgttttagactttcaacataacgatcatttaaaactacataatttatctcttcgttaaaaacttaacattaacaaaaagttaaattcgacaagaagagtttattcaataagtatactgtatgtgtttattttattcacatgaaaagtgtcaaacaacacttgggatacatatttcatgcctaaaaatcgtataacaacatttaaggtaatcagtaaatttgatgcctaaactaaaatatgtgaccattttgaccaatgagcattttttggaaataaaactactgcatacgacctggtcaaacacatgaactgccactgcttttaaaactacctttttaaacttttgacgtccatttttatttactaattattatgttaatcaaaccactaacattatgattcgaaatttcgagtgatgattgttagaagtgatgtgaatgatgcggtataaaacaaattgtgatatatattcactcatatatatcaaaatcaaaatagcttatcgttccaaaacatgattgataaaatgtaattactattcaaaacttaaagccagtagttaaaataaaacaaaataaatagtatatgtttcatattaatgccaaaccaatattttgttttgatgaggaaaagtctttttttttttttctttttttttctcatagttaaaagacataaaaaaaattaatattacaaacaagacaaaaaaaaagaataaataaaacaacaatcattactgtcaaatcaattatcagagggaaaagttattaagaaatgtcaaccaatgagtatcattatcatcatgcttttttagacccttctttttaattcatcaagatttagtcttgtttataaatttgaagtaaaattctaaatgaatcaattctacaattttttccctacattattgtaacgataaaatttaagatcaacaattacttcgttaattttttttctgataaaaatatttgatatctttctgattatgatatattagcattgtttttgtattgtatgtatggtaattaattttagttcaaaagaataataaatggtttgattagcatgaatttaataaaaaaataagactgaataaacataggtaataaactttgtttcttttggtaaatgtaaaattagaaaaaatcataatcccaaggtaattactataattacattcaatgtcagaattaaacgtagtgaataaaaaccgtaaaacatgagaaaaacaagaatttattatctttgacaagcaataaatgaaatgctgacaaaaaattggtttcaaagtttcaacgcgtttcttataataagaattcaatttcgtgcagctaatcaggagataattatcataattaaattaatcgttactactttataatactcccaaaataatcgaaaacgaatttattttattgtaatttgtttaataataaagaattactgtttcctcccacttcccatctctcttttccttttgtgttcttcttcttctccgctttgtttccccaatctctctcttctctctctctgaagaaaaataaataaaagatctaactttgacggctctcttaatcttactcactccgtaagttccaaatctctctcctttactctcatatctatatcgtccgaacaaaacccaggagaattgcttcaccccctttttgggtttttaatcattttctcagattctcagtttctgtttccgtcttctagattctgggttcagtttctgttttgctcttattgaattttcttattcattttgtgtttcggagttattcatggtagctgaatttgttaattctgatgttgttttgcgttttcttcttttctagtttggctatgtcgtctttgatctgatgctgggttattctctttccctctgttttggtttcttttagggttttaagtcggaatagactgatgggagcttgatggttattgttagatcagatgtggatttaaagccttcgctgaactaacaagtctatggaagaagcaaagacccttgttttacactgtatgttgtgaggaatttgtctgattttgggtgataaaggtgaagtctttgagtttgtaattttgagataagattggatggtgggaagagaggatgcgatggggaatgatgaagctcctcctggttctaagaaaatgttttggcggtctgcctcttggtctgcttcacggactgcatcacaagttcctgagggtgatgagcaaagcctgaacattccgtgtgctattagttctgggccgagtcgaagatgtccagctgctcctttgacacctcgttcacatcataacagcaaggctagagcttgtttgccaccattgcagcctcttgccatttctaggaggagcttagacgagtggcctaaggcgggttcggatgatgtcggtgagtggcctcatccaccaacacctagcgggaacaaaaccggggagagattgaagctcgatttatcatcaacgcagcagcgggtaacagataagagctctggtctagctaagagggagaagattgctttctttgataaagaatgttcaaaggttgctgatcatatatatgtgggtggagatgctgtggcgaaagacaagagcatactgaaaaacaatggaatcacgcatatcttgaactgcgttggtttatctgtccggaatatttcaagtctgatttttgttacagatccttgtggttacaggatagtccgtcagaggatataactagtattctgtacgatgtgtttgactactttgaagatgtgagggagcaaagtggaaggatctttgttcattgttgtcaaggggtttcacgatctacctcgttggtaatagcatatctgatgtggagagaagggcaaagttttgatgatgcatttcagtatgtgaagtctgctagaggtattgctgatcctaacatgggctttgcttgccaattgttacaatgccaaaagagggttcatgcgttcccgcttagccctacctccttacttagaatgtacaaaatgtctccacactctccttatgaccctttgcatcttgttccaaaactgttgaatgatccatgcccgggttctctggattcaagaggtgcatttatcattcagttaccttctgcaatttacatttgggttggtaggcagtgtgaaaccatcatggagaaagatgcaaaagctgctgtttgtcagattgctcgatatgagaaagtcgaagcacctattatggtggtcagagaaggtgatgagcctgtttattactgggatgcatttgcaagcattttgcctatgattgggggctcggtaattaaagttcaaccaggtgacaggaaggtcgacgcatataatctggattttgagatttttcagaaagccatagagggaggttttgtgccaactttagcatcatccaacaacgaacatgagactcatcttcctgcaagggaaaacagttggagctcactgaaatgtaagtttgcatcaaggtttgacaaaggttttcggtatgtctccaaaacgccactatctagggtctattcagattcgatgatgatcgtgcattcatcaggctcaccttcctcaacaacttcttcatcatccactgcgtcgcctccttttctctctcccgattctgtatgttcaacaaattcaggcaatagcttaaagagtttctctcaatcctctggacgttcgtccttgagaccttctattccaccatcgctgacattgcctaaattttccagcctatccctcctcccttcccaaacttctcctaaagaatctcgtggtgtcaatacttttcttcaaccgtcaccaaatagaaaggcttcaccttctcttgctgagcgtagaggcagcctgaaaggatctctgaagttgccaggtttggctgattccaacagaggcacacctgcttttactttacatccggatgatagtaatgacatagtcttcaatctggagggtattagaaacggcgatctatatccaccaagtgattgcaaagggacaagtgtagattcagatttgccagagaaggaaattatatccttaatcagttgcagtaaatctgacagacacaaatcgggaggtgatactgatagctctggccagcctttagcatgtcgttggccaagtatggagatgattacaaaactgagcagagcttacttagattcagaatctgttatagcaatcccgttgccaagtgatgctgtaggagaaacgggtagtaggaatttgtacatttggatcggaaagtcattctctttggataacaactgttctctagtagatagcaacaaagcggcagacactgtggagaatgttgattgggtacaaattggtgaatccattttgtgtcagatggacttgccaaaagatacccctataaaggtaataatagcctaaactttggaggctctgatactttttactaattgtaaagtctgcgtgctcatctttgtcatgtcttatccaaccaaactatatttcgaagatgaaaattacaatctcagcactttcattactgactactgaggacggttaggtagaatccttatgatttcagcagttgtatgtattggtttattctctagtggtttgcatggttccaacttgttatgatccttttgttgtttgtaactgataagttgcttttctttcttgttaacagatagttagggaatctgaggatcagacagagttgctagcactgctgagcgcgctataacacccacccgcaagctctacacatttactctgtttttttttcacagattccttcaaccgcaacacttttccattttcagacagagtattcattcagctcaggtgagaattctctgaaagcagtctgtaacacttcatcttcacagttgcatccgaatacaatcgttagttctggattatgtttaattgctatctgatcatgaatttgagttagaggatggttggaacaaaaaaacttagaagctcgaatgaccggtttttaccaaattctcatagaccatatttgattcttttgatttacttctggtgcaggactctctgtgcttatggaagttgatgttgggggaaacaactctcttgtacagtggggaaaaaacttcttcttcttctttctatcacatgaaaatcctcaagggccattattagtatgatcagattataaaattgtaaggttaggggctttatgaggattttgatggacttgttacaatgtttacatatacactcagcagcacaatagatttttgttaaacttacatgttattcaagtaaaagtactatgtagatgttgaagtctaattgaagaattagttaatgatagtcttaaacacttgattcacttgtcatccaattttggttttgcgcatagtttctcttcttttatttcctctctaaaacaccaaaaccaaacaaaatgtcattttccaatccttaaggtttcattcattttagtgattttttgggtacaaaattgagcaatgtctagtgacgtttttactcaaactcataaaccaacattctaatcagaatcacgatttggactttggtttgggaccttctttctacaccaactgggcttgtaatcagttggtagagaaagcccaattatatattatttaaggcccaaaataaatcgatctagggtttacggttttgtttcattttcacttcccttagaataaataaaaaccaccaagcaacttggatctactctagggtttctgtttcgccgctcaggttcgtcaatctctcgatatcctttctctaccttctcctcagctttctgagtattgaatgttgttgttaactgtctctgaatacgattgattttgtgtcatttttctcgtgcttcgtatttgttgattgattgatttacatgtcatgatttgaaatctttgtattgctaattgctattgctctgtttactgattttcttttctggggttatcaggtttcgtgaaaagaatctatcttgagcaatgtctccagctaaaggtacgcctttttttctttcattgttatctgatttgattctacatcgtcttctatttctcttttgcgtgtaattactttgtttatcattattcaatactgtgactgaacttactactgtatacagctttctgaaatgtatgattcttatctggctctgtaaagttcgtattttttatattctcttgctcgtacctactctgttatggattcatctgattatgtgcttgtttgtctgttatttgccaatgatcaaactttccttgaatgagatttgttaccagtagtgtaaatggtttaatgttccattatttttgcagttgatgtcaccaagaaagccgaccctaaggctaaggctttgaaagctgcgaaagcagtgaaatctggccaaatcgttaaaaagcctgcgaagaagatcaggacaaaggttactttccacaggccaaagacattgaccgttcctagaaagcctaagtacccaaagatcagtgctactccaaggaacaaattggatcattaccagatcctcaagtaccctctcactactgaatctgccatgaaaaagattgaagacaacaacaccttagtcttcattgttgacatccgtgctgacaagaaaaagatcaaagatgctgtcaagaagatgtatgacattcagaccaagaaagtcaacaccctcattaggtaaacactaaaacttcactgagatatgggtttatgtaaacatggagtgatgagtgtatgtttgtatgcaggcccgatggaacaaagaaggcgtatgtgaggttgactcctgattatgatgctttggatgtggctaacaaaatcgggatcatctaatctgatcattgtcgctctgtgattttactttttctggtttttctcttccatagtctcagttttgctagagaagttaagatattactatcaccatctctttgttatgcttttatctttggattcaaaaagattatatgtttggtatttgttgatgcgtcatagtttctattcagatcgtgttccaattcttaatgctacctctctaatcccggtttaacctggttatatcgtaccttcgtaaataactaataagtaatacccaacccaaaattcaagtggtccattggacccatctctttgtttagatgctttcaaagtacagaacaagttcactgtggtctgtggagcccaatctaatcaacaaaacaatcgatccgcgagaaactcgtggttgtaaaaaacttttactaaatgaattattgttgcttgttgccggaaaacgacagaaaacgtcggtatcattgaactaacgtcggtattattgaaccattgattgatagttggaaaaaaaagaaaaaaaaaagaaatcatatattccttttgttcctttttgtttgattttctaaaaaaagatatatatattaaaaaaatatattaaagttgattttaaatgtattattttttttgtgttttacaattttctataattttaaaccaataatattcaattatttttattaaagtttataatttatcagtaataactaataaatattgtataaaaaaatctaaaaaatcaatcttcttgaaacaaatatttttcttagaaaatcaaataaaaaagaacagatggagtatctatatattaataaagataacaataaataaaatcatcaaacctaaattgtttcccacgaatcagtttcgagacattggcacgttaaattgtcgatctggtaatgaagtaggctttacatgtagtagactaaagtgttaattaggacctagaccctacagatttgggcataaaccgtcctttgttatgggacgtgttctacttggtatctctagaaccgcggtctttggcagatggatcagattatatctttttgacacttgtatttatatatgttatatgttattggcttctccttccccattggccatcgaacacaccacacagagaaaacaatatgagcaatcatcaaactgtgagataacattttctctcatttcccatctttctttttatcttcaaaactattcatataaccatttatataagaccactctccaaattaccatgcttttaacctttaaatatgatttctgttatcttctttaccatatgattccatatggaaaaattgtcaatcatgtgtttttgtctttgtaatctgaaattacttgatttttgtattttgttttttttttgggggagaaaagcaggtgttgaagctattggagccatggtgtgaacttaaagacaaagtggttcttgtgacaggagcttcctctggtattggaagagagatctgtcttgatcttgccaaagctggttgccaggttattgcagcagctcgtcgtgttgatcgactcaactctctctgctctgaaatcaacagcttcagttcaactggaatccaagccgcagctcttgagttagacgtttcatcagacgcagccaccattcaaaaagcggtcagggaagcttgggacatctttggaaagatcgatgcattgatcaacaatgctggaatcagaggcaatgtcaagtcgagtttggatttgtcagaggacgaatgggacaacgtcttcaagaccaacttaaagggtccttggttagtatccaaacatgtttgtatgttaatgcgtgacgctaaacgaggtggctcggtgataaacatctcatcgatcgccgggatccggggtatgttgcccggtggacttgcttatgcttgttccaaaggcggtgttgacaccatgtcaaggatgatggcacttgagttaggtgttcataagatcagagtgaactcgatcgcaccggggcttttcaagtcagagatcacacaaggtcttatgcaaaaggagtggctcaagaatgttaccgagaggactgtgccgttaaaggtgcaacagaccgttgatccagggcttacttctctggttcgctatctcattcatgactcttctcaatatatatccgggaatacatacattgttgattccggtgctacattgcccggtgtgcctatcttttcatctctctgaaaatcgaaccttataatatcttatcttgtgcaataataagtgaatacatttactcattctctactactttttaagatttacatacatcgtcaaaaatttgcaataacaaaccagcagagacacaaaaagaaaggacagaaaaataaacagcctcctgattgtgatgctttggttgtggctaacaaaatcgggatcatctaatttgatcatgcgtcactcggtgatttcacttttgggattgaaacagacttctggtttttctccttccatagtcttcagttttgctagagactatcatctctttgttatgctctatctttgaatttcttgaagtcaaacaagacagctctatcggatgtactatggaatgtacgaccagagtccataacccattctttgcatgtgctttgagtgctcacagttaacaccaaaggttgcggaggctcagttgcaatattagccaattctgcatgtttctttctttgagggcattcccttttccagtgatcttcctttccacagataaaacaacttgtgttgttacttggccttgactggaatttcccatttccacttgaacttcctgtacatggccttttatttcccttattgtttgatctgcccttaaaatcacccaataatgcttctgaatctggttttgacacgttcagcaatcccttttctttcaactcaatttctttagagtatgctgaacttatgactgcatttagtgtcagggtatccttcccactcccatacttgagtgtatcaactagtgaatcatattgtggtggtaagccagccatgaattgtagagcctggtcttcatcactagtgttgatgtctaaacttgctagatctgcaactagcttgagagaagtatccagattttcttcaatgcttttgttctccaccatcttgaagcttgtgaacttgtgcttcaaatagatcatgttggctaaggtctttgtctggtagtttccttcataaccttccttagaatcagatcgcttagactcatgcttatcagactcttagctattttatctttctctgctttctttggatctaccctaggttcgcatccttcctcttgacttcccgggtctgatggtgtagcatcttcaaccaagacagattctaagcctagaatctccaactgacatagcatcttatgcttccacaacccaaagtctcctttgccatcaaacttctcaatatctcaaatcttgcatttgttggttccatagctagatgtcttccttacaatcaaacctggattgctctgataccacttgtagagaaaactgagaataataatagcttgtaaaagaaacaaacacaagaatttgataaccgagttcacggctaaccgctacgtctcggggaaggactcttatttccaagcttcactatatgatcatagaggttacacacaccactaacttgtgatgtccttggttctttttcagattttacacacaagaagaacaagattcaagaacaacaaagaggaagaagaaagcttgcttcggaagctctttatctatcttctcttgaactctctttagcttgtcttgtcacacaactaccaccacctctctttgtacgttgtaatagaaatgttatataggtgatatgtgatggaccacttttgttattctctcttcatgccattttcgtcaggcccactaaggcccaaaggatgtgtttagtcaaacccaaataacaaacttggtccccaaacaaaagaaaaaataattatatacagtatttgtttagattcttcacaagtactaaagtaaagaatcaataaaccaatcaatccgcgagaaactcatggttatataatatttttgcttgaagtattcatagttgtcaaaagaataaaagtaaataaataatactaaggataacaataaataaaaattatcaaacctaaagaatcagcggagacattggcacgttaaattgtctatttggtgatgaagaagagtgttgactaggatagaagaacctacgggttgggcataaacccgccctttgttatgtattatatatctaagttctatttgtacatcttagttattttatgggcttcttcttctcctccatcgagcacacacatagaaaacaaacaatatgagcaatcatcaaacggtgagattccttttgctcacatttcccatctttattttttatcttcaaaactatcagacgatgaccatttgaaaccccttgcgatggatatgatcactctccatattaccgtgattttaatcgtaaaatctgattgttacatgtcaatcatgtgtttcgtctgtctgtcttttcttggtatcaatgttaagtagcttcttatgtcattttaatctgcaattacttgatttttggatttttaagcaggtgttgaagcagttggagccatggtgtgaacttaaagacaaagtggttcttgtgacaggagcttcctctggtattggaagagagatctgtcttgatcttgccaaagctggttgccaggttattgcagcagctcgtcgtgttgatcgactcaactctctctgctctgaaatcaacagcttcagttcaactggaatccaagccgcagctcttgagttagacgtttcatcagacgcagccaccattcaaaaagcggtcagggaagcttgggacatctttggaaagatcgatgcattgatcaacaatgctggaatcagaggcaatgtcaagttgagtttggatttgtccgaggacgaatgggacaacgtcttcaataccaacttaaagggaccttggttagtagccaaatatgtttgtgttttaatgcgtgacgctaaacgtggtggctcggtgataaacatctcatcggttgctggggtccgcagtatcgtgcccggtggacttgcatattcttgttccaaaggcggtgttgacaccatgtcaaggatgatggcaattgagttaggtgttcacaagatcagagtgaactcgatcgcaccggggcttttcaagtcagagatcacacaagctcttatgcaaaaggagtggctcaagaatgtgaccgagaggactgtgccgttaaaggtgcaacagaccattgatccagggcttacttctctggttcgctatctcattcatgactcttctcaatatatatccgggaatacatacattgttgattccggtgctacattgcccggtgtgcctatcttttcatctctctgaaagttgaaccctgtatcttgtgcttgtgcttgtgcaatgataaatgaatacatttacacattctcaactattttcttaagctttacatacatcatccatgtttttgcaagaacaaaccagcacagacacatataaaggaaaggcaaataaacagcctccaaaatgatttaccaacctcctaaaatattcagattcaatagacaaaatcgatatactttggagaacgaagcaatgaccatgacctacttctgatgcttcgtctccaaaaaaagaataagcagctcgaagactatggaaatctacatctacaggccctatctgctagagaactacccgtggttgtatagggttttttttgaacatcttgtaatcctccggagaatcattgatcagagatgccaaaatcattatcattgatggagcctcaaaactctatatcagtcgatgttggcgtagacctttaccaaagtgtggttgcatcaaacgtacatacaacccattttttgctgctaaagaatcatgtgtaccttcctctactatcctccctccattaagtaccacaatgttatccacatgtctcatcatagccgctctatgtgctatcagaattgttgttttgttccccattatcaatgtatcaagagcctcctgcacaacccgactcgattcagattcgatagacgagctggcttcatctattaagatgatgggagcattcttcagtactacgcgtgctattgctattctctgtttctgtccaggggtaagttctacgcctctcatcccaatatgtgtgtcgtaaccgtgaggtaagctgctgatgaaatggtgagcatttgcaattcttgctgcttccttcatctcagcttcacttgcattatgccttgcatatatgatattctctctgattgttgtggaaaagattatgggttcttgctgaaccaaacccatgtggcttctcaaccatctcaagttatataactttaagtctctcccatctagtaggacttggccagcaactgggtcgtagtatctctctactagtgagattatcgtgctctttccagaacctgaaacgccaacaacagctacagtctgtccgccactgattttgagactaaagttgctcagcactagtatctcgggtcgagttgggtagcagaagtctacgtttttcaattcaatacttccgtagacattaggaggtttgagagcagagttatcatctggttcaatcgtagggactcgatcgactatttcaaacactgatatcagagacttacgtcgcttgaggatatacggtgctaatccaaatggctccacaagggcgaatgtagcaaatgagaaaaccatgtactccgttatagctgtcgataatttcatatatccacggttaacagataacgcagtgcaccataggaggagcgcgttgcaggcgaaaagaagaaactgtgaaaaaccaaacgcaaaaccaatagccatcccatggagatagctctgtctgagtatccgctggagttgcatcctgtacagttccatcactttgttaccagcacagaaagcaacaacagtgtagatgtttctaacagcatcctcgagaactaaagatgcttttctgtgcatctcctgtatgccttttgagaatccggcaagccacagtttctgcaaattcgttttgagaatgattagaatgtcgtgtcagctgaataaacaaacatttttgagctacatgaattgagaatgagatggcagaaaacaaagaagcataagctaaaatcgctacttgaactggaaaggtattgcaaagtcagaaacacatgtgacaggggaaaatgaaaacaaattgactaaaatataaataatttcaaacaattttatagaagaagcgatgcaaacctgagcaatggcagaaagagtgagaattggcagagttgccaatgcaacaagggccaaacgccaaccaagcagcaacccaatcagaagagcaacaataacagcaaaactatcttgaataaatattgaaagcctgttgctgaaggcagctcggacaaaagtagcatcatttgctaaacgcatggataatgtatctggactgttctcttcatcatcgaaccatccaacttcgttacgcagcattgctgaaacatcagagaaattaatgaactcaggcaagtaaaagtagttaaaatgggataaagtaaattataatgaatttaaaaaatttccaatacctgagaacatcatcctcctaactctctccgtcattttctctcccattatgccaaaatagaaatgctgcaagaaattggcaacaactgtcacaatccccatgcaggcaatgatcaaacaccatttgtcaacctcctcgcgcaggtggcctcctttgcttttataatattccgtaactaccaacgcaatgacataagccagaagaggattgaaagaaccaaagatggcagcaccaagactccctaatacagcataaagccactctgggaaactaagctgtgccaacctccaaaacgaaggtgactccttgtgttgagcatccttagacgccttaccatttgctttagtgtcatcaggagaactaagaggacgactaaacgtctgcgaatgggaacgctcgtttttaggatctgatgtcaaaaggggtgaaacaggggactctggctctgagccgtttgatttttgttggggacactgaacgtcaactttaggaaggtgtggcaacctcatctcgaaactatcttgccttttgatagttggctctttatcagcacaatccagagacatgccatcttcccctgttttctcagatgcagggctatgagctttaggtgattcttcagtatcaaaacacagttcctggggacggaacacaccactacctctttgaagagatggagacttaatcattttgggtgatgatggttcttggacgccacagccagctgaagagtctctctcgacctcaaacaccgcagactccttgtagttcctaactggcatcctggaccaacataagagtttttaaacaagtaattaccaaaaaaccacattacgggagatcataacaccagaaaataaatacccaaaacatataatttgccacatgactactacacgacttaattgttaagttctaagctatcataccttcttggaagctttgttgcttcttcacacttcagaagctcagcatacagcccaccaagatttatcaattcatcgtgtgtacccatttcaacgagctgaccctcctccatcacagcaatatagtcagcattttttatcaaacttaatcgtcgggctattattatggttgaccgtcccaacatcagaagatcaagagcttcctgcacaattctttcagcttcgaagtctagtcctccagttacttcatcaagcagaagaattgttggattcaaaagcacagctctagcaatcgaaagtttaattttctgctcctctgtcattgctaaaccggctctcccgacctagaagaaaaacaaggcatttcccacttcaatgttgaataatcaactgacaaaacaggatttcagaagtcttttcaaatgatgtctacctgtgtttcatatcctttttcaagtgagctgataaatgtgtgcgcatgcgcatttttagctgcctcctctatctgatcaagagtagcatcacgaccatatgcaatattctctcttatgctcaagctaagcagagcaggctcctgggtaaccaaccctatttggcttctcagccactccagttttagatttttaatattttctccatcaagaagaacttctcctgcataagagaaaaccacagatgtagtcagctcatatttgtcaccattgacaggtgagtggtgcatcttaaatcacaagtcaaagtacctaatgtcggatcataaaaccgttccattaaaggaatgatgctgctttttccagaaccatttctaccaacaagtgcaactgcttttttagcaggaaccgtgaggtaaaatccgctcaagattggaatttcaggtcgtgacaaataactgaaatatacattccggaactcaatatttccttgaacagaagccagcacagctccttcttggttagccacagaagatgaacgagttatcatctcaaaaagtctatacgcagcaatccttccttgatcaaaagagtagaagttcgtagcagcttgatttaaccccctgccaaacaatttatgcataatcaagacattatttctatgtaaaatatgtatatatctgcctgtatatgtaatgataacatcaaaaaaatatgtgcataattatgtaacagagactgagaaaatagatatagaaacatcagtttcaatagaaaagcttacaggccacttaaaataacagcaaaaagagctgctatgatttctccaccatttgcccttccattgtgaacaaagaatcgtccaatccaaagttgcagcgcacacgagcatatagcaagcccataagtaaatccaagtccaaggccttgcacaagactaattaatatgccgtatctcagggttgcttgaagggaggttgcatatgaatattttgctagagtttcatttgtaaaggcatataaagtcctaatgtaagagatcgcctgcacatttaagataaatctttctaagaattagaatattgacaccagactctaactgaggcaataaactagtgtcggaagggagcactagaaaatgggatctatagggtacacattacaaaaccacttgtaatcatgcatagactatcgagtgtggttactaggcattcccagtgatgtacatcctagcaaaacaaaaacaaggctatcccttggtctacattttgagatgaaactggcagaagtttaactgattcttgatcacaataaaacctcattgtatctagtgaagtaacctagagcctaagtacaatcttaaccctcttcaattctacctaccattttctgaacttaacaagagaagagtgattaataagagcaaaaaacaagaaaagatattgaactttgtaaggcataattctacgttatatatgcagaaaaagaagttccatgccaacaaggcacatatgactataagaaaattgattaatttcaaatgcttaaagagtttagtttttagcttccagatttcatagttcaagtggtcagcgatcacaattggcaccaacaaacttccaagttttgaatagtggccaagagaaaatcttgatgctaattccataatctcccaataaacctatcaattgtaatacctgttcagcaatgccggctgcttcagcatatgcatcctgtatgttctcagcaagtctgtgtagaaaaatatttgatatgcctccagcagcaacgatgaaaggaccagtggctagtgtaatcaatgcaatttcccagcagttgacaaatccaataacaagtccactgataaacgtagccatgttatgaatataatttccaacctgcaaagtccaggatcaggaagaagattagagaaatagcaacaaagtaatactcacagttacaaagaaagatatgaatgataaaactagaaatggagttggacgaacatactttctcgcttaaagctgactgaatgagtaagacatcgctcagcacttggctcacaatatctccattattaccatatgtatcaaagaaactcatatcttgattcaataatacttggacatacttggacctgatcacagcagtctgcctttctccagtcagtatccagcaagacacctctattatcagaaacatttagtaactgttaagcatcatcatttcagttgtggaaaaaagatgcatacaataagcgaaaaacaaacttaccaatccaaccagaaatgaaaacacctccagcaatgtacacgatcgtcaacgaaagctgcacaaaaatgagagcataagtaacttaaaagaggaacacatgattggagtacaaaaccagaaatgccaattccgagcaaaatcatgagttgtcagaagtttcactaacctggacgagtcggtcaaactggtgttcagatctctgctgactagaatcattagagaaagcaagaacatcaacaatcttggcgaagtaatgcaagtagacaataagcgcagtaccatgagcagcagcagcaacagagccaacaatcataagcacccaatcaaagcggtcagcgcaagcgaagagctgagagaaaggaacagcagcaggaggtggttcaagctcatcttgatcatccatctcttcatcagcctccgctagcgccgccgccgtgcccgtgccaccaccagactcagcaccagggtcgagataaggagaaggagactcaggtggctcggagacttcagagactggagttaatggttgcatatgaggcggagaccatccgaataaacctctagagatcatcatcttcggaggagcaccacacaaaacaccttctgtgttgaaaaccctagattttcagatttttagggattttgattttgtttttttcttcttctaaaattagctggatctgttgctaagtttgtagagaggaagaagaagaagaagaatcgtagaagaagaaataattttcttccgccttttttttcttttaattattttccaataattttggtgagattttttataataatttgtgttgccgttgcagtgtactgtgccgtcacctaccgtaacacaagagctggttctgctaacggacacagcgacttcgagtttgcatattttttatatattactggtgagctaattcttgacagagcatttcgattactgactttctcgtagctgtaacatgacactttataagccctttctggttagtagctgaagctacaaaactatgactagagatcaaattgaccaaacaagatgaagttaggttaaaagcagagagagaggtaaggaggcaagtcaagagttattgaatctctcttacaggaaaagaatattgttaagggaaagagagaagaagaatggacaaaaatacaagaaatgggcaaaacaagagacaaccaaagcaaacttgattacagtattttcaaacagtgatcttgaaggaatctaccacagtgtgaagcctatctttcatcttctcccacctcctttcattcgctcccgtcgtcagtgtgtagaagtttcctgcacagcaaaacgccatttctcgatgagcattggatactgcagtcagtgtgtattagatatgaatgtgagaattcatggggatgtatataccgttgaaaaccgtgatggtacccagagcatggcgagtgtagtttctagcttgaacagtgaactcaaactgataataagtcttcccatcgacatcatgctgcagcactcgaaacaaaaaccaaacaatcaaaaccaccctctctctctctcttattattacattcaagagcctccactcaattagtcgaaaaaagctatcaaaaggagcaaacctctgatgcatcaataagggttgttttctgatttggaggtgccaaaactttctttatcagtgtttcagctatctgtaaccaaaccaagttcaatcattaaagagagtgaaaaacaacaaccaaacaaaagagaagaacattacctgcttgggagggccaaattctttaatagtctgtttgctagttgggaccaaattcacactaacactttctaaaggctcaatcacatctttgtataccttatcttgaccttcaatcacaacttcctaaacacacattcaaaacaatgagacaagacattgtaattgttaaaaagtgggcaaagaagatcacaaaattgatacctgccaaccaaatggatagagaaacgcataagcatctttattgtcagagacagcaaggaatccttttttgctttctgcagcaactgagccatatcaaacatttcaaaattacacacaaaaattgcaaaattagtgacaaacaaaaagggtacttacatgataatggagctctactaagcaatgagatccaaggagcaacaacaccaaatgttacaatcagacgtctctgacatttatctgaaaaaaacgaaataaaaacacaaactttataaaagggtttgaagaaagattcgttttttcctcagagaagcagaatatagagagtaatttgaatcggaaacacgtaagaaaagacaaaccttgaagatgagaagaagaagacgaggaatggtgctctgcttttacaagaaatgaaagtcctttcttagaggaaggaatcacaccaaccttagaaatggagattggagaagaaggtgaaagcttcagagaagccattggagaaaaagtgtaatatgtggtatagagatagatcttttgttgtcttctcttatggattcacttctttctcagtttatccacttttgaaacttcctgaccttttaaaaatgtcagagagacaaaaaaaacactaatttgcaaaaatggcccttcaaaataataaatctttgcaagataacaaaaatgtaaccaaaacgcacagtttcaatgggtgttttacataaatatacaaattaggatgaacagttaaacattttggggctctttgttacagtagtagacgttttatgaaaagcccataataaatctgaagcccggcccatatgtaggtggtatcaaaatcatccaattagggttttatgttttttgtttttggcggtctcagtgaagaagatggtgctgtcgaacaagaagctgaagcagaggattcgacaagatttggctgaatcactatctgtctctgtatccgaaacaaatccacaatctcagtctctgaaattgctccttgattcatctagccacaaacccagattgtcgaagagagagaaacgaagaaattgcgaaactttcgctagagaagacgacgaaatcagagagaatgaagttgggaatggtgggtcaagcgagaagactgatacgaagattaaaaagaagagaaagagagacgatgctgtggaagtcgacgagttagaaggagatgaaggaactaaggaagagcaaaaaccccagaagaagaaaaataagaagaagaagaagaagagaaaggtaaacaaaacgccaaagaaggctgaggaaggcaatgtagaagagaaggtgaaggtagaagagattgaagttaatacagacaagtaagtttgttttaaccgacttcattttaaagctctgttagtttcaattttatgtaaattaatcgacttggtgttttgttttccagtaaagaagaagatggggttgttcctaacaagttatatgttgggggtattccttatcagagtacagaagatgagattcgtagctactttagaagctgtggagtcatcattaaagttgattgcaagatgcgtcctgaagatggggctttcagtggtattgccttcatcacttttgacgtaagtttttccatgtaacgttgctgtgttatgatgcagccttttgtttttgtaagaacatagatcgttgttgttttgggattagactttagagttagttttttgccttggtggctggagattagagactggttaaatggactgtgtcatacactgtgttgatattttttttcgtttcatttatacagactgaagatggcgcaaaacgtgctttggcttttgatagagctgctatgtaagtaatctatagctgtgactcaaatattttaagactttccttggtcacatttgatattggttgagtaatttttctttactttactactaggggtgatcgatatttgacaatccagcaatacgtgaaaaccaccaccccttccattccaagaaggaaaacatcttctggtttcgctccagaaatggtggatggctataacagggtatacattgggaatttagcctgggacacaacagagcgtgacatacggaagctcttctctgactgcgtaataaactctgtgcggttgggtaaaaacaaagaaacaggagagtttaaagggtatgcgcatgtggatttcaaggatagtgtgtctgtggcgattgcgctgaagctggatcagcaggttatttgcggaagacctgtcaagatatgttgtgcacttaaagacagaccagctactgatcatacacctggtgaaacgaacaatgctggttcgtacaacatggaagatacttatgctgctgctgatccagtaccggctttagctgggcgtagcgaagttgatgacggaaactactttgcaactacggttagcagcagtaaggtcaaaaggagggtctgttatgagtgtggagaaaagggtcatctttctacagcctgtcccataaagcttcaaaaggctgatgatcaggcaaactcaaagctgggtcaagagactgttgatggtagaccggctatgcaaagctatggtcttccaaagaatagtggtgattcttactacatgaatgagacatacgcttctacaaatgaaacttataatggaggatactcagcatctgctgttggcactggtaaggtcaaaaggaggaactgttatgagtgtggagaaaagggtcatctttctacagcctgtcccataaagcttcaaaacacttctcacacaaactcaacgctggatcaccaaactgttgaggcaggaccgactcaggtaacaagctatagtcttcaaaagaaaacaagagacactgaaaacaatggtggttcgttcatggatgagagctatgctactgttccgatatccattgatgtgacaaatggagctaatgatgcaagcttaacatctgcggttagcactggtaagatcaaaaagagaaactgttacgagtgcggagaaaaaggtcatctttcttcagcttgccctaacaagctgcaaaaacaaggctgatgatcccacaagctctacaaagacagcttatacattttgttcttaaactttacatttgaatcattggaggaatatggaaggacgtggaccacttggtagaagagtggagttttggtcctcttttagaaaaccataaattttattctgtattgttttatgatctttcatagaatgctctaaagtctaaaaaccaaaagtatcttaatatattggattattatttcttgacgctccaattctctcttctcttcatatgttgttctccgaccatgatcttaaaaatgtcggcacaaacagagtgataaaaggtaacaaacgaagattcttgacattagaaaagactgagaatccaatagattaaagagtagatcaaatatatgcctattgcggactataacaattagaagataagcaatccaattatgcctgttaccaatccgaacctagataattaaagttggtccaaaggatctttaatttcgaaaaccttcttttgcaattaatcatcaaaacaagtggcaaaaaaaaagaagcaatggccacgttttttttttttttgaaagtcgaaatcaaatcacattaccccaaatctctcttctttgaactttaatcctcttctctattgcatgctttaagctccaaacccaaaacgcaggaaaatctctttgacagtttttggttttagatgggaccaatcaaaacgataaagaagaagaagagagcagagaagaaggttgatcggaacgtattgcttgctgctactgctgctgctacttccgcatccgccgccgctgctcttaataacaacgacgacgacgacgactcatcatctcagtctttggattggtgggatggattctctcgccgtatttatggtatctctttttttttcctacctttcttgttggtggtgatttttgcattggcagagtttttgttttttgaatctaattgttgattctgtttcatggaacttgcaattctgaatgttgatttttatttgggttttctaggtgaaaaagtttcagattgaatttagtaatgtagacaagagatgtcctttaatcttactctgtacattggagtattgtttcgatctattgattcgtagttttgggggtttgtgagttcttattcgattctagttgtgtcgtggctaacttaagtgagctatatggatccatggaagtggtttttgtgtagatgaagttgttcttaaggctctaggggctcagtttcgagccatttagactcatctagataactttgagcatgttttttttttcctgttttcgattttggtttaaatgatatgattctttagaaccaatttgggattagcagactttgactagtcttagtttctttttccaatttggcaagttaattttgttttgtaaaagttctcattgctttctgatgatgacattattaactctctttgtgaagagtcagccagatgttttccatgtctctttcagtgatgttctgattatgataagacattttttgcccctcttcccgttgtctctccctgtgtaaatgcgcttgtaggtcgatgataatcaattgataggtcattagctcttctgcttttgcactcttcttttagctttccgagtgttggatttaagctagtccaatgttgtatgagctgatatataatgtgatttaaacagttatggatctgcatggttcttttacactgacttcattacaatgaatgtgtctttgtactaaagagcagtaagcttgatcttggatacattgttgattttgtagttactatgagaatgtcatgttttttcttttcatctcctttttcaggagggtcaacggatccaaagacatttgagtcagttttcaaaatatcaaggaagacatttgactacatttgctctcttgtgaaagccgatttcacagcaaagcctgcaaatttcagcgactcaaatgggaaccctttatctctcaatgaccgtgtagctgtggcgcttaggaggcttggctctggtgaatctctctctgtcattggagagacctttgggatgaaccagtcaacagtctcccaaatcacttggcgctttgttgaatcaatggaagagagagcaatacaccatctctcatggccttcgaaactcgatgaaataaaatcaaagtttgagaaaatctcaggtcttcctaactgctgtggcgctatcgacattacacatattgttatgaaccttcctgctgtggaaccgtcaaacaaagtttggttggacggagaaaagaacttcagcatgactttgcaggccgtagtagacccggacatgagattcctcgatgtaatagctggttggcctgggagtttaaatgatgatgttgtcctcaagaactcaggattctacaaactagttgagaaagggaagagactgaacggggaaaagttaccgctctcagaaagaaccgagctaagagaatacatagtaggtgattcaggttttcctcttcttccatggcttctcactccataccaaggcaaacccacgtcgcttcctcaaaccgagttcaacaaaagacactccgaggcaacaaaagccgcgcagatggcactatcgaagcttaaagacaggtggaggataataaacggggtaatgtggatgcctgatagaaaccggttaccaaggataatctttgtctgttgcttgctgcacaacattattatcgatatggaggatcaaactttggatgaccaacctttgtctcagcaacatgacatgaactacagacaacgaagctgcaagctt

SEQ ID NO: 107 - DNA, 103240 bp, Arabidopsis thaliana
aagcttcaaaacacttctcacacaaactcaacgctggatcaccaaactgttgaggcaggaccgactcaggtaacaagctatagtcttcaaaagaaaacaagagacactgaaaacaatggtggttcgttcatggatgagagctatgctactgttccgatatccattgatgtgacaaatggagctaatgatgcaagcttaacatctgcggttagcactggtaagatcaaaaagagaaactgttacgagtgcggagaaaaaggtcatctttcttcagcttgccctaacaagctgcaaaaacaaggctgatgatcccacaagctctacaaagacagcttatacattttgttcttaaactttacatttgaatcattggaggaatatggaaggacgtggaccacttggtagaagagtggagttttggtcctcttttagaaaaccataaattttattctgtattgttttatgatctttcatagaatgctctaaagtctaaaaaccaaaagtatcttaatatattggattattatttcttgacgctccaattctctcttctcttcatatgttgttctccgaccatgatcttaaaaatgtcggcacaaacagagtgataaaaggtaacaaacgaagattcttgacattagaaaagactgagaatccaatagattaaagagtagatcaaatatatgcctattgcggactataacaattagaagataagcaatccaattatgcctgttaccaatccgaacctagataattaaagttggtccaaaggatctttaatttcgaaaaccttcttttgcaattaatcatcaaaacaagtggcaaaaaaaaagaagcaatggccacgttttttttttttttgaaagtcgaaatcaaatcacattaccccaaatctctcttctttgaactttaatcctcttctctattgcatgctttaagctccaaacccaaaacgcaggaaaatctctttgacagtttttggttttagatgggaccaatcaaaacgataaagaagaagaagagagcagagaagaaggttgatcggaacgtattgcttgctgctactgctgctgctacttccgcatccgccgccgctgctcttaataacaacgacgacgacgacgactcatcatctcagtctttggattggtgggatggattctctcgccgtatttatggtatctctttttttttcctacctttcttgttggtggtgatttttgcattggcagagtttttgttttttgaatctaattgttgattctgtttcatggaacttgcaattctgaatgttgatttttatttgggttttctaggtgaaaaagtttcagattgaatttagtaatgtagacaagagatgtcctttaatcttactctgtacattggagtattgtttcgatctattgattcgtagttttgggggtttgtgagttcttattcgattctagttgtgtcgtggctaacttaagtgagctatatggatccatggaagtggtttttgtgtagatgaagttgttcttaaggctctaggggctcagtttcgagccatttagactcatctagataactttgagcatgttttttttttcctgttttcgattttggtttaaatgatatgattctttagaaccaatttgggattagcagactttgactagtcttagtttctttttccaatttggcaagttaattttgttttgtaaaagttctcattgctttctgatgatgacattattaactctctttgtgaagagtcagccagatgttttccatgtctctttcagtgatgttctgattatgataagacattttttgcccctcttcccgttgtctctccctgtgtaaatgcgcttgtaggtcgatgataatcaattgataggtcattagctcttctgcttttgcactcttcttttagctttccgagtgttggatttaagctagtccaatgttgtatgagctgatatataatgtgatttaaacagttatggatctgcatggttcttttacactgacttcattacaatgaatgtgtctttgtactaaagagcagtaagcttgatcttggatacattgttgattttgtagttactatgagaatgtcatgttttttcttttcatctcctttttcaggagggtcaacggatccaaagacatttgagtcagttttcaaaatatcaaggaagacatttgactacatttgctctcttgtgaaagccgatttcacagcaaagcctgcaaatttcagcgactcaaatgggaaccctttatctctcaatgaccgtgtagctgtggcgcttaggaggcttggctctggtgaatctctctctgtcattggagagacctttgggatgaaccagtcaacagtctcccaaatcacttggcgctttgttgaatcaatggaagagagagcaatacaccatctctcatggccttcgaaactcgatgaaataaaatcaaagtttgagaaaatctcaggtcttcctaactgctgtggcgctatcgacattacacatattgttatgaaccttcctgctgtggaaccgtcaaacaaagtttggttggacggagaaaagaacttcagcatgactttgcaggccgtagtagacccggacatgagattcctcgatgtaatagctggttggcctgggagtttaaatgatgatgttgtcctcaagaactcaggattctacaaactagttgagaaagggaagagactgaacggggaaaagttaccgctctcagaaagaaccgagctaagagaatacatagtaggtgattcaggttttcctcttcttccatggcttctcactccataccaaggcaaacccacgtcgcttcctcaaaccgagttcaacaaaagacactccgaggcaacaaaagccgcgcagatggcactatcgaagcttaaagacaggtggaggataataaacggggtaatgtggatgcctgatagaaaccggttaccaaggataatctttgtctgttgcttgctgcacaacattattatcgatatggaggatcaaactttggatgaccaacctttgtctcagcaacatgacatgaactacagacaacgaagctgcaagcttgccgatgaggcttcatcggtcttgagagatgaactctctgaccaactgtgtggaaaaaattcatcagcttgattactctctcccggttcttgtggtctttctatgaaagcttcatttgcttctttttccttctggtaattttgtttagcataacattttatcgtttgatttgatctattgacatattcttttatgggacaaacaaaaatgtgtatcttatgaatgttatttttaatttatacaacttgtatgtttcatcgacgtctaaactcattgcaattgtcattatagaatgccgcatagactgatttatgttactagtaatcatatttattattgactcatgtatgcgatacataaagaggaattggtttgcgtgagaaacaactacacaagtacatttctaaatctctctaacttcaaaaatcaaaacatattgaaacaaaaggaataaacatgttataaccaatacatagaccgaacaaaaaaggaaacgatacagagaacccaaagaaagtctcattttcagctttattaagagcttttactgataagcaacaatggcttctaaaggaatggaggaagtatcacccatcttcttggatactttggctttccatcttttccatcaaatatctgcaataccaatatcaaacaatccacaataagaacattatttgagaattttcagttccgctaaaatcatatcgtgagaccgctatgtttacctttctcagacggctgtgctttccaagagcccaattagtcatgattagagcagcaacagcgaggaaaacatatcctgcaatggtctgagtagcgatgttgaatcctagccattggtaaatctcggtagtgtaattggcacatgtaacaatgttgaagaggaaaccgcgtggaatctggtagcctccagccccactggggtccctcagattcttcagcaatatgtgacagtaaaagtttgcgacttggcaaaccaaaccaaacccgaaaccaatcttcatctgaaggtcactaactggagtgtacaagggatggttgacgtaataagcaatgtaagcaccaaagctccagtaataagcacagttcctgaacacattcccgattggggaggttgcgtggctgaaccgatgtacgaaaaacgtttctaagatccgtttgaagtagtgaaagcaccagtagtacatagcgtacgtctggaccggatggatcacacagtcctctccataaccaagaaacttgtaaacagggaagtagtaaaagacagggtagataaggagagggccaagatactcgaagaagaagagtgtgcggtaggaaacttgtgcccccaggtctttgaagactacagttaaggagttgttgtttccatcacagtactccttcagtgatttcttgctattgaggacaacaggtttgtccttcgatccaggagtcacgggaagagtcagtctttgcctcgacgggtaaaacttcttagctgttgaaacaacaaaacccaaatcaaacagtttaatacctactgagagaaaatcaaactaagatttgaatgaacgagataaatataatacatacagaatatacattgtactgtatagtaagatgatttcagataattgccattgatggacaatctaaagtgaacctttattaaagctaaaaagggactgatccataaatgacaaaaggttgtgatgattaattcaaatccaaaactgtgtttagaagcttaagtgatccttatcagcagaaaacattatcaaatctaaatactccttaagcttccacacagatcttgattatataaccccataagcatcaaatggtataaggagaactcaaacacataaacactagcttaagcttacacactcaggtgagatctataccaacattcgacaagtcaaatttcaagtaaaaatgaaaactttggaaactttacctctcttatgaaacgcttcttgcagatcagcaacagtcgcctgcgaagcacaaaacacacgaaatcgaaatcaacaacccaaaaatcataaagcatgcaactttccctacattgagggaccaaactaaagaacaaaaaccttcaatcacattttggaaacaaacccacgaatcagaagaagaagcagatcggagaagagagtatcataagaaacgagaaagtaccgaatcggggaggtcaaggggagctttgaggacttctctgccgctgcgggagacgacggtgaccttcatggtgcttaagcggagcaaacgaggaagacccagatgaggaaattgagagagatagagagacaagggaaattaaatagagaggaagaagaagacgagattgagcattgaagaggatgtagttgggagtaggagaactactaactatcttcccaacttatgcgattagattgggaccattttacatttttagttgctccccatcattttttttttggtttttactccaaacaaaaacatttgttgcaattgcaaattatggctttgttttaaggatccaccattagtaattactcagtttaggtttagatttttgttttttcggtttatgaatctactatactatagattatctgctaaggttttagtttcggttaagtttcgaattttagtcaaatatataatttgtattcaaaaacaaaaacttttactataattttttttatcaaatcgagtgatccggtcaacttagataggaaccaccaaagtgttactcgttttttttttggtatttggtttagtcatgtttagttaaaacgtaaaagcattgcagtattcgctatagaaaagagtgaaataatgttacctagaagagattgattcatgagcacaaaaacattagttgcaaacttctaccccctcacttgatgacatatgtccatcgtattgatctaatgctaaaataaaatgttgtatcaatgcagtaaaaaagttaggattttacataccacaaaatgggatggagtaatgagaacgaatccttgtcattgtcgtataaaagatgcaaataataaatgatcccggcccttaaccacatggaagtagtgtgttagtttagttatattggtcaatgaaatttgcttttccaacaaaaaaaaatcacccaaagtcaatcgcatacgagagctctattaattcaagagagcagcaaataaagcaaaaactcaaaacctaagttttctgaatatgaaaggggttagataatcattctctcaactagttaaaaaaagtaatgataaaattaaaaacacaatggatcaattaagagacagtagtttatgatatatatggttgggatcgattagttgacatcacaaagatcaaaataatgaccggtaattgcccaaataccaaggcgacaattcatgcgatattcaaacaccttaatgtcattcaaatactataactaactatcctcaattaacaaagctagctagatttttctcaagtgagcaacagtctaattcttctgaaaaaacttgttttttccgagtgtaaattatccaatctacttactacaatttgagcattaatctagttttctctgcaactttaaaaccaggtgtacaagtgtcaacaccagatctagcgtaaaacacttaagctagtacttaaatagattatgcctattttttcgaccattatatattaaactttccagcctttcgtgaaaaaatgcgcatgttcttgttggaatctaggaatcttcttctactaaagattggcatgcacgtggtaacgatttccattgtatactatctcgatattttcccaccttaaatatcttgaaaattaagatcaaattatatgagaacatatattgtatcattgtttgtaatagccttatatagtgtgtagatgtgaactatggatacaaaaaacaataggaaagaaaaagctgcagagaaggtgttgctttacaactatgaatatgggctcatgagatgtacactacagataagcgaagattcctgttgcatgaaaatgtgttactaataaaaaaaacacatgcacatttctataaagacgaatttcttttaaataataaatttctataacaaataaagataagtgctcctttaaaaacatgcaaaagaatatatagatttaccgtatcagattttcatacaatttttatattttttgagcttgaaagattaacatgacaaactgtatcgtgtgtcctcgtctattcacccctagaagaagtgaaacatggaactttatgtatttgcatacggcgagctagcttcttccctacttgtccaatagatgaagacattatcactcaggttcagctacttcgaagcgcaacatatcgacaaaaaatcgttttagctctatcatctgtcttttgaagaaaaatatcaacatatcaaatacatatacacactccccacaaatatataaccacaatatatattggttactacgaaattccaatgatattgctctttgaaacaactaaactgtgaattacaagctaaggcaatatatctattatattctttctttgtgtctcaacttcatccctttctaagtaattcaaattaattggaagttttgtcatctaaattgaagttcttcttaccggatcattttgtctcaggttgatatatactttcttagtctgatacgaaaaacttataaatataatgattagagagagacatgtttgatgttatatttttctggtaaaaaacatcttgattatgaactatatagttagggatatgtttgatgttgtgtgtcgacatagtgaggtccattaaaaagaaggtctgattaaattttacgtttggaccacaaatctttcttttagaaatcgcggactgggacaccttcctacaacatgtccgtctttactaatcttacgtacccctcacattcgtaaccataaaatcatcaaatataatatagagactggtgatcataattcgaaatatttttcactaattcaatgttatcggtaagttatattaggggtataacatcaagaatcacgaaagaattaaaaacaaccttgtcgaatcatgatttgattttttggcttatactttctaatttttatatcttgtgctgcaaattagcaccaaaatatatatattcttcttcttcaacatcgaattctttattttgttaaaggcatttttttcttaacagaggaattttacatcattcttagactgaactttcgggataaaaaatctcgccatgcaaaggtaatttattttttcatgacaaaagccacaatggcgataattataactataatactatgcaaaacgaaactttacttgggtcataccgaggaaaacaaaggtacactcgattgtgacaactccaccaaagaccaccccactaccaattcacctttatttgtttctttattcactcaaaatctttttaatttttttaattaattcaattattcgcttctctcgttgttttttaaccttttaattaaaaattgaaaggaggtgcctagggtttctctctctgcatggccactctcgctcttcacatctttttttgggcaccattgttaacgtatgcaaaaaaaaaaaaaaaaaaaaaaaaaacttacatgctaagaaaactctctttccttgtcgtttctctcataaaagaaatttatttaaacttattttagtccaaaatttatcgttgctgatgaaaaatacaatataggaagtgggatcggatcggacaaggagtgaattatctaccaacttagatttcactcgtcttttgattgacaagtaacatacacaataaacacatatgcataattatttccatcttcaaccaaatgttgtagtgaagtaatttgatctatgttatacggacatctatctactaaatttttgaaaaaaaaaaaaaaaactatctattacatgctccaaattattacttgcttatgtaatttatgcgtatattagagatgttggtgtttttctgaaatttgatatatgttcttttatctctgaaatatgatatgtgaatcatcatagcattttcagtggttacaaccttatcgaatcgacaaaagattgaaacaaattggaaaaaaataaaatagttttactattttctaagcagcgtgaaatgaatatcagtataatatatgaaacaaattcgtacgtgataaatatgtatacagtgatacaaccaagaacgatgacgtatatgattgacttgcaaaaataagcaaacaaaatacctgttcaaatcgacacttaattccaaaaaggttagtaataagtaagaaggcttttatttatgaaaacaaaaagaaataaagagcctaagagaatgatgaaaattgaaagagaaaaaagagcattgttatagaaaagaaaaaaaagagagagtaaagagaattaagaaacacaataaattaaacaaaggaaacttcatttcttctctttatcccattcagctcctcccttctctctctctctctctctctctctctctagatcaattctttcttctatgatgtgattatccaccatatctgcgacctcttacctaaaaaggatacaagtaagagattcaaagatggttttctcatctcttccagtgaatcagttcgattcccaaaattggcagcaggtaaaaatcagtttatgatatttgctagatgtttctgattcgttcctttttcctccaagctcgatcaagatttatgaaaatttgatgagattttgttcgacaaaattcctagctattgtggacgcgcatatatattacttatgaatattcttagttgattaaaccctttttttttcttgtcttctcgaatatacgaaaatatataaagatgatttcaattttggtctttttttctacttcaagactttttaaaaaattattcttagttgataaaaaccttttttcttgtcttctccaagggcttatgtataatgtttttcttacaggattaattttctctttggttagatttttacaccgccatggaattatcacttcaaaaataaaaaagtttaaagttactatgactttaatctgagttatttatccattttctttttgcagctttgttgaaaaactataattaatctgcaattcttgtcaaagtagtcacaatttttatctattttcttttgtctccgaccaatgtttcaaactcgaatcctttcgttaaaagttgtttctgctttattataaacctgaaactaattagtacaaattatgttaatatgcagcaagggaaccaacatcagctagaatgtgtcacaactgaccagaaccctaataattacttacggcagctctcatcaccaccgacttctcaggttgcaggttcgagtcaagctagagtgaattcaatggtggaacgtgctcggatcgcaaaagtcccattgcctgaagcagctctaaattgccctagatgtgactcaaccaatactaagttctgttacttcaataactatagccttactcaacctcgccatttctgcaaaacatgtcgtcgctattggacacgtggcggttccttgaggaatgttcctgttggaggaggctttaggaggaacaagagaagcaaatccagatcgaaatctacggtcgtggtctcgactgataatactactagtacttcatcacttacttctcgcccaagttactcaaaccctagcaagtttcatagctacggtcaaatcccggagtttaattccaacttgcccatcttgcctcctctccaaagccttggagattacaattcaagcaacactggattagattttggtggaactcaaataagcaacatgataagtggtatgagttctagtggtgggatcttggatgcatggagaatacctccatcacaacaagctcagcaattccctttcttgatcaacactaccggattggtgcaatcttcaaacgcgttatatccattactagaaggtaagggaggtgttaatcaaggtgattctcaacagaagagtagtgattattccaatcagctaatgtttaagcccttgatggatttttcttcaggcggggttagcgccacgcaaacaagaaatgtgaaggcggaagagaatgatcaggatcggggtagggatggggatggagtgaataacttatcaagaaactttttgggtaatatcaacataaactcaggcaggaacgaggaatacacatcatggggaggtaacagttcttggaccggtttcacctccaacaactcaacaggccatctctcattctaagtactcagcactagctattcttgatgattcttttgttggttggggtgtacattggtgcttgtcatgcgagttattgctgaggaagatcaaaccatgcagctatatccaaaggctaattttgaggctcaaaggaaaggtatggttataaaactatctttttgatcttttaaaagatcttcaaagtgtgagtatgtttattggttggcttctggtgatatttatgttttattagaatttggtcttatatattggctatatatagaggtgtgggtgatatgtatgaattcaagagttgatgttggaaacttttttgtgtgttcattgaataatcatcgaattctcaatttcttggagacccattatgagacattgagacatctatagaacatatatgtaatgtatattaaacgtacttaagtcgaattttatgaccaaagtaaataaattatgccgaatgtacatgctaatatcgagtttaaactattttttccaatataacaactattttctctttcgtccaacttatatactcttattctgattcttattttcttctttttaattcctttttcctttcccaagacacaaaaaaaaaaaaatacagaaacgaaaaaaagagattttaaaaattcataacccacgagaattatgcacctaaattcagactaatcccccaaatttcagaaatttatgtatttttgcgatttaatattgtgttcacaatcataatggccaactaactaattgaaaagacaatggaatgactgaaaccatgcataatctctcaagtctcaacctatgaagaatcatgtaaccaatagactatcatcatgattagttaatgcatgatctataatgtattctttgaacatagatatgtcatttatctggatataaagatggcgttttaacctactttgcaatttttgttatatctttcttctaatacatatgatcaatacacttttgtttttaaaagaaattaaaaacttatttcaaacatcgatcacaacatgacatagggtgaatctacacctaaattgactacagtagttagatatatatacttcaaattttaaatatagtgatgtacgtatgtaattggtacttcatattattattatgatgtatgtaattggtacctatattttggaacagaacaaaaaaagaagacactaaacgagctaaagaacaatggaaatttcagttataaggaattgtgggataagggacaaattaaactaacgtaagactagcgcgcaggtctatatatgtgtcaaaagcacggacttatataggtacatacatgagatacaccccccatacacacttatacaacacattcatgaagagagtcatatttcattttcttttaacgtattttttgggccaatccattttgttttcgctattattcggattctatatttctagctccctattaatatgaaattcattaatcaataaaaacgttatttgtaaagatagaaacgttttcgaggaatttctcccgcgacatcaagtttacatattgcggtatcaatacacattttctgaaaatagagaaatgaatttttatcaaaagctgaaagaaacagaagttttttattgctaattacaaactgatttataagcgttaaaagtgaaccgaatttgagtgtgagtggtagcctaatgagtggtgatctccaagggattgtggaatctggacctttaggatctgcttttgcaaaaaccaatgccctcaaaagaaagcgtttatttcccaaaatcatatcactctcttccccattagcattagagttaagagaagcatatgtttaagtctcgtcctcaatacatatcaacgcaactttaggcccaaaggtcatctttcaattagtgcaacttctttttttccttgctctattctgtttttgaatgtacgtttttcatattacggtctatccgaaatagtcgctcacgttcttccacatgccctcaaaccatgacctcactatcttctttttcacatgataattttatgagatattacctttctctaatgaataaactttattctaattcacttttgattcttttccttaaaccaagtgcgatcggtttctgaattattttattggaaatttggcaaagatagagctttgttttgggcttgtttccatatgatctctagtgttcttgggctccttccaagattaggcaagtccagtctcctgctcatgtagtagttggatatatctcttctctgggatacatacctaatcggttttgatcttttgttggagattgttcgggtccggtcttcggcttcttcttttgtatgtaaccaaaccgaaattgaaattgtacatctctctctctctaactggtatattggatattttcctctaattcattatttccattgacaagatttttcccttaatatgaacaaacatattccattttagctttaaatcacaaaaaaaagagataaatttctcaaaagaaattataagtagacaccgccctttttataaacaaccctaaaagtagtaaaaataatatcgagacgagacgggtttgtttcttctctctatctctatatctaccaaaatcctttgccccccgaatctagttctctcgatcgaccctgtgacgatggctaataaccaagcaagccttcttctgcagaaacagcttaaaggtttctcttttattctctcttgttttcgatctgattttggtattcgattggttttgatttcgagtattgtggtgaatttcgtttctgggtttagctaattcttcttgggttcttttcagatctgtgtaagaaacctgttgatggtttctctgctggcctcgttgatgagaagaacgttttccaatggagcgtctctattatgggtcctcctgatactttgtagtgcgtttctttttccctattcatgaatttgtcttttgcttatttcaattgtgcattgatttggtttcaatttgttatggcattggctaaagcttgattctttatgattggttctgttgtgctactttgctccactcattggataaaacattaatgacttgttttcctcgtctgctgtttattcatagtgatgaatttgttatggtaccaatatttacattgcattgaaacttttatctctctgattgcagtgaaggtggcttttttaatgcaattatgtcgtttccggagaattatccagtttcaccaccaactgtgacgtttacctcggagatgtggcatcctaatggtgactgatttttctggaaaatatatctctttctcgagcttttaggatttagtcttctgatgatttatactcttttgactgcagtttattctgatggaaaagtttgcatttctattcttcatcctcctggtgatgatcctcatggatacgagcttgcctctgaacgttggacccctgtccatacggtatgttttttcttttaccgtttagcttcagtactctggtaatttgtttgcagggttgagttatctatggcttcgaatatcttggggtctgctttatagcctaacattcttcgaatacagctagctttctcttgtgtagatagcttgtagaaacagacatgttttgttcgatattgagcttatacagtgattgcttttcaaatgttcgtggaatttataagtcaggacttaggaatactctggaggatagtgcaacttagattgaacctctgtcgttagggtgcttgagtggaatatgattcactttctgatttatctgccctgtaccacctcttaatcgatagtgttcttattagatcatgaggaaagaaactagaggtacattgaagctaatgttgggtctgtgtatgatatgcaggtagaaagcattgtgttgagtatcatatcgatgctctcaggtcccaacgatgagtcaccagcgaatgtggaagctgcaaaggaatggagagacaacagagcagagtttaggaagaaagtgagtcgctgtgtgagaagatcgcaagagatgctatgaacatctctccagcgtttttttcgtgttgtagaaatatcgattctaatcttcttatgagaaagcctaagcagaaccaaccatcttcaagcagcagccagatgaatctgactttgcaaaagcttctctttctttttcctttttgggttttgttctctaaggtttggtttggaatattggtgtggaatcaaatccgctccatattttaggattatattattgcactcgttaatggattcgtttgatctggctttttaactttattctggttttgggttacaaaatacttgcctcgttaattatctcaaatttaactgatggtggtttaactgcaaaaggccagaagttcgaaaagagtattgttattcagttggtatgcaacaaaaaattgtggttaatggtttcaactgatgttgccgcggtcataagaaacaaaacaaaaaatattccttgaagattgcggggtctagcacacgagctcacacataaaataagataagagcaacgagaagattatatttttaaatgtcctaaccatatataatttaacaattaagggatcaatcataaatttattcgtatttcagttacatgactggttaattatagcccaaattttttacaattaactattattatattcatatgctaggtttctttcttactcattattggtccactcacatcttccccaaacaattgtatttaagtttttttcttcgaaagttatcacttttagttagatccgcaaaatcgtggatctccaaagctaaaacgaaaaaaaagaaaaatagtctataagtaaaacatgataccgaacaaaacaagagtatataacttatagactataagtaaacaattaaaacaataaagaaccaaaatatgtgaaccaaattaaaattagtgttaaattttgttttggttattctcgtgaaaaggaggaatagctcgaacgtcattttcacactttctttaacgactccactccagcattaattacccaaacagttctgttgcaaaaacatttaaagagagaccagcaaaagttttgagttattgtctcttttgtgtgtacctaatccattttttttttttttaaagaagtaatattacggagtatattgctttcttaatgatatgtcagaaatgtcccgtgtaagtaatatgaaaaccggttttcaaatcaaagtgcactttctctagctcacctgtgtttggtcgaactcgaatccctctgaccactactaacgtaaaaaagctcattgcattaatgtttcgaccgtttcatcgtttattatactgtcttaaattaaaatcattaagcatttaattgatttgtcatttcgaaatttatgttgacaaaaatgactttacgatcaaaccggtttgattaagtaacgtagactaatgctattatggtgatatatatgcaaaagataagaatagtttatcaacgaaaggatctataaattatgcttgttcgacttcttagcatagaaaattggtaatttatttacacctcatgccgttaaaaaatcacaatcacaagtattcataacctaaaattcaacaaagaaatcaattacgtattcttcatttttccacattaaaccagaatcttaaaccaaaccaatccaaaaaagcgacatttaaaccaatccggttatcaaactatctctctctcactcacacacctttctcttttcgcatcactttccctctcattcttctttcttatctctctctctctctttctctgactctctccttgatgcctcgtgactgcaaccaaagcaatttaaaaccgccgcacttctcatgagtcttcttcctcatcatcatcatcatcaccgttaactgtaatttatcttctccgatcttcattctccgccatgcgctcgccgcatgctttccgtaacggcgaatctccgactttacgggaccatactcacttccactcaaccgtcacagctcagaaactccgtcgattcaactccttaatcctcctcctccgtctcgcttctttctccttctctctcgcttccgccgtctttatgctcaccaattcccgcggctccgcttctcctcactggtacgatttcgacgctttcaggttcgattcctctctcaatctttttcctcaatttcgaaattcatgaaccgaatctaactttttttgttttggtttgctttgcagattcgtgtttgtggcaaacgcgatcgtggcgttatactcggtgtttgaaatgggaacttgcgtttgggaattttcaagagaaaccaccttatggcctgaagcttttcaggtctggttcgattttggccatgaccaggtatactatttttaaattgaataaaggaaaacatgtctcaacgattagctactaattttctacgaattgagttaattattttattgttaagctgatctttagtttaatccctaattaaataactaaccaaacccattgcaatgttcaaatattggtaatgggggcaggtgttctcgtacctattgctatcggcgggatcggctgcagcagcattggctagaacgatgagaggtggtgacacgtgtacggctaacaaagccttttgcttgcagtcagatgtagccattggcttaggctttgctgcttttctattcttagctttctcttcttgcttctctggttttcgtgtagcttgtttccttattactggctctcgttttcacctttactcatgatgattgttttatggaattgattgatgtgttaaaaagaatttaccataagaagataaattttataatccctcaaaactatgaagagcttctcaagtttacataacaaccataaatttacagtatttcataaaattgaagagatcagaggaatgctgtaatcagtttttcaggattttgtggagttggttttaagcttcagctactgtaggagtttgctctactactttgaccttggctttgccagttttcttaccaacctttggcttcttctcatcttcttctttctctggattcagctcgatccttgcaaatacgggactcgcttgctccattacttgtcctccctttagccctccccatttggtgtcactctaaagacagaataagagttagatcaaagccaaaactcaggcgagttttgttaaacggtaactaaaatctggtgaatgaaatcgtatgttacccaggttatgctattgaattgatcctctgtatagccaagctgtgaatagatcctcagacttaggcaaggtgcaacgggggataacgcaaccgctatgactctcattacttccagtataatcaccagatcctgcaattataagcagaaaaccagtcactagctttgatatcctccaaccatcaaattggtaatagatcctttgttttgtaagaagaatggcaattagggaaacgaaataagaccttggctgcctcttctgctgagacaccaccttgtttgaacagaaaccatggtgctcgttgatccatgtaggtatttcccgcatttccaatctctaaaacagcttcacacgctgatgatagtgacagattttcatagtttgtcctagccttctcaaccttttaacagagaatggtgcagtttgagatgaaagattgacctaataaagccattttgagacgaaagtggtgtagagatgtcattagaaccttaccagcttctccactgtgtctttcaaaggaactccttcggctgcaactgtcgagtctaccactaaagtggattcacagttctttttaagaagaccaagagtacggttaagaagatttcctgaagagaaatgcattgataaacatttttcagaaacaagttctgtaccaaataaccaaaaggctgaacaactacttaagatttagttttcgtagagtaagaaacctatagtgttggcgagatgtgcattgacgatttttataaatcggtcttctgaatagtccccatcgtttccaaattcaacctcccgtaggaagaaatacctcacggcatctggcccaaatttctgaaccaactcaaacggttctagagtattccccaacgattttcccatcttcattccatcctataatttgataactatgggatatcagaaaagaaaaatccaattttcctctcacatgttaacatgactaaaggaagttggcaagaacaagatctcaacactgaacagggaatatgcagcatcaagagttttttggtcatgtacctttgtcagaaacccatggccaaacaccatcttgggaagttcaagaccagcagacattagcatggcaggccagtagacagcgtgaaatcgtagaatatcctgcagaaaagcggcattatcaaatagacaaatatgaagtcatgaatttggaaacacatgtgtgaagaaagttgtacttcttgccgcaatccagaagctggaaacaaacagttctcaactaaccatttaactacacttctatttcatttcatttcactgaatccaaaacaacgaacaaccaacaattacgtttaaatttaatgatcatggaattgctattgtttccagtaaatcccagttattgaaggtgaatcagattaatattacaagagtcgataatgactctaagctatacctttccgatcaaatgcaatgaagcaggccagccaaatgaaacagcagtttctagattttgttgtttgttgtcctctgttagagctgatatgtaactgcaatgagaaacggcaaatattaacttcaatgtttaatctcgcaactaagagaaacaacctttctttatatgaacagacataagttatgacatatcatcaatgtgtggagacataacaaagacttaagcagtaaccacatataattcttgatagaaagaaaaaagatatatacccaagtagagcatcaaaccaaacatatatggtttgcttatcgtcgtcgggaacaggaattccccaatccactaatgctcgagaaatggaaaaatctcttaagccactctttatccaactttgtacctacaaaaaaagagactattagaaaaggattaagaaagaatgagctataataaaaaactctctgttttcttttgaataatctgtatcaccaaaggttcacatgcactacttgaatgctacaaggaagagaacttcaaagaatgtgtctcacctcattaagacgatacgaaggctgcacaaaacgaggattctgggccaaaatgtcttcaagtggtttctgatatttcgacaaagcaaagaagtagttatcttctttccttgcaacacatggcatttgatggacagggcaacaattgttttcaagcaactctttctcatcctacagaattcaaaaacaaagcagacccataaagcttgtggcacaggcaagaaagtatatatacctttccaaatttcaaaatcaaaccttatattcctcgcagttaacacagtaaagaccttcataatcagctctgtaaatatcaccgtttgcgaaaacacgagcgtagaactcttttacaatagcttcatgcttaggatcagtagttctaatgaatttgtcataagctatatcgagatctttccaaagagttctataagattgagaaatgaggtcacaatgttcaggaggattacgtccattagcagctgctgaagtagctatcttctcaccatgttcatctgttcctgtgataaagataaccttcttaccaagcagtctctacacagataacaacataaaatcaacactttgattcctttaaaaattgaaactttaagtcagagactgattgagaaacaaacctggaaacgagcaattgaatcggcggcgatagtggtgtaagcactacccatgtggggaggggcattaacgtaataaagaggagtggtgaggacaaatgtctcgccttcatcgacggtactttcctgggaactggaagtgcaatagagagctctcttccctgaggaaaactgagaataataaggaagctttttggaaaatctgaagctgtttcttctaaaagagaatggtttggtattgaggggagtgttaaaaggctttaaaaaagagagggcgttatgaagcgaagtgtttatcctcgccgccattgatgaaagaggacatccaccggagaagaagcagaggaaggaaatgaagaaagggactgctaaaatttggagcgcaatttaggtcatggttcggttttatcggtcagcgaagcgagttatccggtataccaaggaaaatataactaataaagtcaaatttttaaatttttttatctatttcttgcagagcattgagaatatgttaatccaattgacgcccactcttccggttaagagagccgtggttgatttttactctccaacattgcaaaataattacatgttggtcatctaagatcacctatcaactaagtaccaacagcccatacgtcaagtgcttcgttcgtgataccatgagaaatggactctagtgacatgatcaagttttatcataagtggcgatttacagggctccaccagctagttttattaatccgtttggattttctaaagtcgctgagttttgcctctaatccttcatagctatgaaagagtaaaatattaccgctgtgaaggtccactgaacaaagttacctcgatgtacatattgaagcccttgaaggatcatcagtgtgaaacggcgaataaagtgtatgggaagagttcctgcagtagcatactccataaagtgtatggaaatgcttttttatctcatggaaaagggttcctgcagtagcatactccataaggaaaccataggttgtcggagtaagcttatgtatgcactttcccgtgcattgaacaattacagttgaaccttggaacactgagattagataaaattcttgtctcgcctcagactcggatttacaactcttatagacataatacaccacattgccatccggtgtataaattgcagtagctccaccttagcagaatccgcctcagacgttaatatcttcttcattgtcctagggagtaactctagatctatttgatcacacaaaatctcttctgctcctacttttggtcttgctaaagccatctgtttcatctctttcacaaagtctgcataactatgagtagggctggacacaagacaagtacttgcaaaattgaagatatttgtgacccgacttgccttatacaagtaattggatttttggcttgttttgtcaaaacgagtacttggtcaagaaaattgatttcaccgctgattaagtcttacggaatcaagaaaattttgttgaatcattaaatttattttgcttccaagccattgtttcatttcttttattaatttgtgtgaaattttattaatttgtcttctgctctagccctctctttcacgtatataacatacatagattaaactcatccattttaacatgtatccaagtccaattttctcggtggtcaaagtggcgttcttcgtacaaattatcgataaattttatagagaaattttacaaattatgtaatttcttacaaaaatttgatctaaaaagtagttttttctttataatcaataatgtttatgaaaccaattatacgtagaaacaaatattttgttttaaaaaaaaaaagaaaatcgacatagtaaaagtattagaattgaactttataaagaattaatacaaattgaaaaaaaatagtagaattatatttcactaaatatttcaaatttcatatttatatattaatttataaagattttactgtatttttttgataacatttacagcaaatccaataagtccattgaaaaatattcagaaaatcactaaaacattctatttctcgtcttaaagttgtcaaagattaatttttgtttgtataaaaaaaagctcacttctgttactaacttgttggaccttttattaatttgtcttgtgatttagtttagacccctctttcacgtatataattttgttacatatgaaaaacgagacaaaaaatcatccaatgaaattataacacgtgtagatatttatttcaatctgcttacgaaaaacgccactttgaccaccgagaaaactggacttggacaaaaagacagtctttgttctggaacggcgtttcacacaggtggaggccaccatcaaatatttaattacaaaactataacattatatattccaatttataattttgttactttcttatttgtttcttttttgtttagagaagaaatagtaaacgattgattattcacatcgttgacttgttaatctattttaggactatataaaatcaagagaaaaatattcagcaaatcactaacacattctatttctcgtcttcaagttgtcaaattatggtatttgtttgacatttccaaagaaaaatctacatttcataatttcatatatattaatttccttacacataaacctctaaatattttcatatttacataaatagaacaatattccataataattaatagcgttatcattctagaaaaagggcaaaactttaaaaaccaaccctttcttcctcctcctccgagttcttctttctcttcttcgcctcctcctcctccaaggtaaagtattcagctttttcaaattcagtttcttcacaatcggaaataatgaagctttcttaatccaacattttctctttatccaacaacagatctattttttcctcatcagattcatagatttcgtactgttttttaaatccagattgtgtttaggtcaccgagttgaatcttaggtcgtattgatttgtagattttcctctttcgtactcttgttcttcgttttatccctcagaatatgatttgagaaaaaaaaagatctctttgatacttcatttcagttaggacgacattaacgtgtgtgtgtctgtttgtttgttgtgtgcagtgtagaacgacgattgttgaatgcgttattgtaattgttaagaattgaagttaaagtgttgtttttgaatctggtgaaatggtgtggtttcgtgctggttccagtgttacaaagctagctgttagaaggattttgaatcagggtgcttcgtatgcgacgaggacacggtctattccgtctcaaactcgttcctttcactcgactatatgcagaccaaaggctcagagtgctccagttcctagagctgttcctctttctaagctaactgatagtttcttagatgggacgagcagtgtctaccttgaggagttacaaagggcttgggaagctgatcctaacagtgtagatgagtcttgggataatttctttaggaactttgttggtcaggctgccacgtctcctggcatctctgggcagacaattcaggagagtatgaggctgttgttacttgttagggcttatcaggtgaatggtcacatgaaagcgaagttggatccgttaggtttggaacagcgagagatccctgaggatcttgacttggctctttatggattcactgaggctgaccttgacagagagttcttcttgggggtgtggcagatgtcaggattcatgtctgagaaccgaccagtgcagacccttcgttccatattgacaaggctcgaacaggcatactgtgggaatatcggatttgagtatatgcacattgcagatcgagataaatgtaactggttgagagaaaagattgagacaccaactccttggcggtacaacagggagcgccgtgaggtgattctcgatcggcttgcatggagtactcagttcgagaatttcttagctaccaagtggacaacagccaaaagatttggacttgagggaggagaatcattaattcctggaatgaaggagatgtttgacagagcagcagatcttggagtagagagtattgttattggaatgtctcacagaggaagattgaatgttctgggtaatgttgttcggaagccactccgtcagatatttagtgagttcagtggtggtattaggcctgtagatgaagttggctacactggaactggtgatgtcaaatatcacttgggaacctcttatgatcgacctacaagaggtgggaagaaaatccatctctctttggttgctaatccaagtcacttggaagctgcagattctgttgttgttggcaaaaccagagcaaaacagtactactccaatgatttagacaggaccaaaaatttaggtattttgattcacggagatggtagttttgctggacaaggggtagtctatgaaactctccatcttagtgctcttccaaactacaccaccggaggaaccatacatattgtggtgaacaaccaagtggctttcacgacagatccaagggcggggagatcttcccagtattgtactgatgttgcaaaggctttgagtgctcccatctttcatgttaatggggatgatgttgaggctgttgttcatgcctgcgagcttgctgctgagtggcgtcagacttttcattctgatgttgtcgttgatttggtttgctaccgtaggttcgggcataatgagatagatgaaccatctttcactcagccaaaaatgtacaaggtttgtgactttattttcttaatatgttaacccaaaaagcatctactatggatttatgacttgttgaagttttctaatgtttttgttttgaactcccttgtcgcttttcaatttgacaggttatcaaaaatcatccttcaacccttcagatctaccacaaaaagctcttggaatgcggtgaagtatcacaacaggatattgaccggatacaggaaaaggttaacaccatcctcaatgaagaatttgtcgctagtaaggactatctccctaagaaacgagattggctttcaaccaattgggctggatttaagtctcctgagcagatctcacgtgttagaaacactgggtgagttggtttgtctttctttctttattttttttctctgtcctattgtctgttaaactttacacttttcttcagcgtcaaaccagagatactgaagactgttggcaaggcaatttcatctcttccagaaaacttcaagccacacagggcagtgaagaaagtttatgaacaacgtgcccaaatgattgaatcaggagagggagttgactgggcccttgcagaagctcttgcttttgctaccttagttgtggaaggcaatcatgtccgattgagtggtcaggatgtcgaacgaggaacatttagtcatcgtcattctgtccttcatgaccaggaaactggagaagagtattgtcctctagatcatctcatcatgaatcaggatcctgagatgtttactgttagcaacaggtacttttacctccatccttcccctctaggaattattgtgctcctagcttgttttcacagctcacagtaaactgacatagagatcgactctctattgctcaactatattctttttcatttctccaaaacgcgatcttacattttgagagaaatcccgcgagtttgttacttgcataccagaattctcattgtaaagattccctactaagctttgcttgttgtgtacagttctctttcagaatttggtgtccttgggttcgaattgggttactccatggaaagcccgaactcgttggtactatgggaagctcagtttggagacttcgccaatggagctcaggtgatatttgatcagttcatcagcagtggagaagccaaatggctgcgtcaaaccgggcttgttatgctacttccccatggttatgatggtcagggacctgaacattcaagtgcgaggttggaacgttaccttcaggtaaattcttcctagatcttatgggttatggtgttgaattagtgaaaatatttaatcgcattttgattctcttcctgactataattatcttctgttatagatgagtgatgataatccctatgtcataccagacatggaaccaacaatgcgaaagcaaattcaagaatgtaattggcagattgtcaatgccacaactcccgccaactatttccatgttctgcggcgacaggtaagacctatttctgattatctcttttaccggtcaccaggtgttgtttccagcttacaatttctttatgtcactcatgttgcagatacacagagacttccgtaagcctctgattgtaatggcaccaaagaacttgctccgtcacaaggactgcaaatcaaatctctcagagtttgatgatgtccaaggccacccaggttttgacaagcaaggaactagatttaagcgattaatcaaggatcagaatgatcactctgatcttgaagaaggcatcagaagattggtactttgctccggaaaggtataaataagctttgttcattttataagatgaatcttgccagtcccagatatgtaaagagaaattcttgctttgcttcgttgtaggtctattatgagcttgatgatgaacggaagaaggttggcgcaacagatgttgctatctgtagagttgaacagctttgtcctttcccatatgatctcattcagcgtgagctcaagagatatccaagtacgtacctaaactatctttggattggtttggtttagcttttatgtctacctctataacttgtttttgtattggtctgaaaaagatgcggagatcgtttggtgccaagaagaggcgatgaacatgggagcattcagctacatatctccacggctatggacagcaatgagaagcgtaaacagaggagatatggaagacattaagtatgttggtcgtggtccttctgctgcaactgccacgggtttctatactttccatgtcaaagagcaagccgggcttgtccagaaagccatcggaaaggaacccatcaattaaaaactcttcctttttaaatgacttctcagactgataagagaaaaaggagaaaactttgaaataagaactttgggtgatgcaaaagtgctaaacaacactgtcaaaatccgctgtttctttgatatttttttggtcccattgattttgagcctggctcgtgttgccagtcaaaacattaaaaaaaaatcttatattgatatacagttttgttattgctcttctttttttcttctttgaatcatcttttgcgttgtcattgtcttttcccttatcttcttgttctctataatatgaaccattgatttcaattgagttatacaactaaccaaaccgttttgaaaccaatatcgatatatgtctgtgccatacaatttactattaagaacgattaagatttggttttctatcaagcttgctacaaaagcattccaagttaaggcaaaagtagatatttatgtaccaattttcttattatatccgaagaaacaaaaaaaaaaagttattaataattcgtagtataggatactaggatttcaaacgccttgacgaaggtagatttgttcataaaatcttcaacctcctccactccaccatagcttcaccaacccactttagaaaatgaagttgttatcacttatcatacataaagacagccaagttagaacaagtaaaactcagatattattctctttgccgaagtgcccatttacatacatcatagatctacaatatgttagaggatgatatgtgacatgtaataccaatatcatatagtttctcaacactattaacatatatactatccaaaaatgtaaacaaaaatcaaataatcgaggatgccttttgataatgtaacactttagaaaaaagcaaaattgtggagccactctaattgctgctgcgaaaaatatgcttttagaggatgcactcatcatacctgtcatgtgtgagacatttggtaccatcattaccagcttcaccatcaaatctttatccctctttctttttcattattagtttttactaataacaagttattcatgttaagagatgatcatagaataagactgaaaattgttgcaaacttgtcgctatgctgttccaaatcatttaccaggattgattagcgagtaaaccatgttttaagcaacgttataattaagttttccttgacggtggaagacaataatttgataaaaacataaaaaggggcttgactagtcagtcttgcatgtaattaatgattttttcacatcattcttggatgggatcaagacttcacctaaatgcatttaagtatttatgaaatctaccaaacaaaaccttctttgatttgcccatttcgaccactactttgttgttttgtactaggtaacaactattatgctacttgtgtgatttaatttttaagacctttattatgacaaagttaagaaattatataattcctacaaatacgaaatactagtgataaaaaaaatcatagccttttgaaattatcaaaatagttctaccaaacacagtgaaataagatcaaacctttccaactgaactaacaatagaagaaagtaggaaacagtttgataacattctccatatagtagcatcaattaattatataagattaaagtttcttcccctactattgccgacactatatttatatgttttggtgaatttatagttcacccaacattttatctttcaaatttataaattttatagagcattttgacactacctttaaatttcaatatggaaaatcatatataagttataaccattgaaacaaaaacttcagaccaagtttatatcatcaacaataccatcatagttaaaaatttggaattgagaatggttgtagcaaaactgttttaactttgaatttttttaagataaaactatactgttattttatataattttgcagtttataatggcatttattgcagttgatgtctaaacaaactttccaatcaaacatacttcagaaacctgtctcatgacgttgtaataataataatatagcaaaatcaagaaacaacataattcactaaaaataaagtaagtaaaagaaagaaagaaagagatagtggctcaagtctcaaactcaatcaaaagcaccaaaccaaagttaccaaacttctcatcaccaaaagagagaagaagaagaaagaaacagagaatcgccatggcagagaaagagaagaaaacaaaaaagaagaagaagaaagagaagcatcaatcttccgacatctctttcaagccttcttcagacgtaaaaggactcaaattcggcggccaaataatcgtcaaatcattcacaatccgacgagcaagaacattcgagcttcttaaactcctctctctcccttcttcatcatcaccgccgcttctttccacggcggcttaccttccgacaaacttcacaatccttgcacaccacgcatggcacacactaacactaggtctcggaacaagaaagtccaaagttgtggtcttcgtgttcgaaacagaggcgatgaaatcatccgttgtggcggcggaaggaggaatctggccatcggagattccattgggagatgtgaacaagaagatgatcagaaagttaaagaactgggagatggcaaggtttaagttcagaaaaggttgtatcacgttttacgtttacgccgtgagaaacgccggaaatgaagggtttgcggcggcggaggacttaaaggtaatattacaagcggtggtggcattgaaagatttcatggatcacaccgcaatgcttgtaatgccccaccagaaaagtattaattacagctcttgtcctccttttgccatggctcactgaactttgaacaatattatacaagtgggccctcttctcttttttcttttctttttactccttttttttgttgatatagaaaaaaaagttcggattattatttatttttggttccataatggggttgtttgttattaatttcctgtatttttttctttgatttgggtggaagattgttggtatgaataagattaaaactgttgagttgggttggttttgttcgtgcatttcatccatagtgatcagaagctgaatctcacttagaattcttaggtaaatcttaaaaaatgtggaagaattggaagattggagaaatatatgtatgaaaaatatttacatttcattagttagtcaattttttcatataaattaaatttcttgttttttctaatttcacatgttttttttatcaataagatttttcttcagatcctataaatcatcattttagtatatgttatgattttcagagcttagttttaagtgtcattatacatatatgacgcatcaaccgaataaagttagaagaagcgagtgttaagggtagtatgttatcctatattttctatgtagttgtgatgtctctgcacattacaatctagtattggtgtattgatctcaggtcacaaccgcacacttacattacatgtctacttctacatggtctcacccaaatatgatttgaatgagactagaatttactacagtatttcatatattaacaattctgtaacattgtcatgtcaagatatgttaacaatgtaaagtcatagttttacaacatgtcatagttgtccaatgatactactactacacattgtcatatttcttagtcttttaaacctttgtcgggtcaaagtatgattggtcgaggaatcggcatttagaaatcttcaactgatgctaatctcatggcctagaaagacataattatcttgtagataaggttatgtttctaaacgcttatattgctttataggttgatggaccatctatatccaacataaagatcacaagtcacacaaatcaatgtttttaagcgtaacgctgaagcaaattttatggaagttccactttatttaaataaaaggaatcagcgaaaaaataattaacaaaaaaatcttaaaattaggataatccgaaattaaacacaaagctgatgatctctcaaatccaaagttcctcagaaccattatgttaggattttccagacaaatactactacatagacaatctccttagtacttacatgcaccattgcttgggttgttccctacgatcataccagttccactgaagttacaagcaccatcagtgcggccgtggctctggaaataagcattcataacaaaagatgcgtgcgtcctcaaactgctcgggttaaagcacgaaccaccagcttggatcggtttacagtcaacaccctgaccacacacccaattaatactgtcttgcagctgagtattcgtcgccccggacctcgctacacaccatttaccgccggcagtactaggtgcgggcaatgctgggcggcctccaccgccttgtccgtttcggagaagaccaacatcgtaaaccggggagaaatctgctcggaaaagtccccagttacgctctgcggtcggaccgggtttgccttcttcgttgaagagaccgaaaatgtatgtctcgaaccgtctgttaggcatgagaggtgtcccttggccttgtgcacgtttgataatgttgaggttgaaccaagcagcattcgcaggcgagcaccaaggtgcgtcacaagcagatggccagccagtctcgccaacgacaatgttaacatcaccgtatccaagagctttcatggctgagtatgtcgagtccatgagtgcatcaaacatgttggtgtagacgtggcgggtgaacgggtcacggactgccttgtacggtgttcggaaaattgcgaagttgacgtttttggggtcaaaaccaaagtaagggtacgggttaaccatgaaaggtgacttggttcggcgatggtaagctaggattggagccaatatgcctttgtcccaacccggcctgaatctaccgctgcttggtgcaccggtcaggtcataggctatgatgttaagtgagtgtgcggttgtaacctgagatcaattgcaacaaatagtagtattagaatcaattgttacctaccaatctccaacaattttcatatgataatcatgttggtctaaatttcctatgaaattggtacattatctcatttacctaggatcacatatatcatgatgtaataaaggaaacataaggcatggcagacagatgaacgaatctaaggacaataggataaccttggacggtgatgagataagcacgtgggatagtctaaatggtcagatcttaatccaatcgctaacattttcaagtttcaaatctttgaattttgctttgggaatttatttttttcctctttttaagaaactaacaatatacaagttggatgaaaaaaagaaagaagcaaacgcaacattctacgtttgcgtgaaattttggatttcaagttagataacagacgaaaaaatagagattgaatctaatttttcaaaataatcaatttttgttttgcatatttttttcaacgttgtttttcaactttatacatatgcgcaatcaatgcattatctctgatataaaaaagggaaagaaaaaaaaacagtgcatttttcacgccaatcatcaattcactattaataattacaatttcttttagttaaagaaaattaaaactaggtaaaaaagttaagtaaacaaaaaaaaaaaaaactttcccactagcaaatatcaaattcaaagttgagatttcaaaattttttatctgaaatttatacaataatgaacatcaaacttaactttaattttatttaccaaaaccaaacaaatattctacttattccttaaaatagaaaaatctgaaaaatagagagaaagctgaccttaacatctctgacaccagcacgaaccaaagcgttgttaagattcctcatcgccggtaagagattattgatcatgttattatctccggtgagcagaatctcatttccgactgagatatacttaatcttcgtctgaggatgaaacggcaaaatgttaaccgaaacccaccgacgagcttgtcttccgttagccaacgccggaatatcaccgttaggaacggtgacaacgacggagataccagttccagcgaaggcacgtaggatatcgggattcacatcgaagatcttgacgctatcaatcgaagtttgtgtcttgataaagttagccacctgagtcggtggtgggaggtttccgagagttccgtagttaacaccgatggcggagatcacggcggggatggtgaggaatacggcggcgcagaggaggaggagaagagagattgacggtggcgctttggccatctttttatatttcggaaatgagaaaaccaaacgattccaagtgaaacccgtgaatcgtttgagttgtgtttttattattacgacgaatagatttttttattcttatcgagaaagtatttataataaaaattaatagatatgaccgttttgtatagcgtatacgtgtgtatatttttagtgaggaacagctggattttgtggaaagcaaaataaaagaagaagtttgtgttgtctttgtttttcatgtgcgtcggcttaaatttaggccgttgtaaattattgaaaaagtggattttgttgtgaccgtggaaactttagttaattaatttggctaattatagagtctgcttttgtttggataatcaatttgtcatctttttctttaatggtttttggctggtaaatactcatactatccaagtttaatctaaaaatatacctctttcttgttaatcgtaattttacaatcctaattttatccagatacggatgaactatatttgaaaaaaaggaactaaagtgaagttaagaaaacaaaagagagatcgagtgttgttttttcttggatacgtttattaaaagatgttcttaatgaggtcaaaggagactatctgagtttttactgctaaacttaaaactaaaaaaaaaatcgattagtaatattgatgtatcaacgaaatgtatatggttaaatattaagtgaaaagaaaaagaagagagatcgacgcggtttgggataatgccattggcccattggacacgtgtttgtaggaggaatagtttggagtttgaacactacggaccaaagtcaaagagattcgaagtatgaagatgttgttgaggaagctgattcgaagtaacttttaccgacacgctttagccatttgttatgctttctttgggaaaagaagatccgcgtccatgtctcattgttaacagtttattgtcattttcaatgacatggttacactcattgcacacacacacaaaccacgtaattttgtatttttttaattaaatcccatccttattttttgcaataacaaattaccattgttactttttaatgatatcacataaaataatcgatgccactcgatagccctttagactaacaatatgtttgttgaagtatgccacaatgtttgaagtgagccggctcaatgctctcatggtggtttagtagtttaacttgagaacttacaacagttttctccttctccacactatttgtatccaagaaggggcattacaatatagaattgcataatacgatttaaacttttaccaaaaaaaaaaaagaaaaaaaaagaaagaattgcgtaatacagaatttatctttaagggaatacaaatataatttggtttcagaatcatctcaataggctttcctttaaccaaacttgggttttattgatgtgcttgctttaatgggcctaaagcccatacaacagcatcactatccacgccgttgtctattcttattattcaccccacccggtacaccgaccaaaccttggccaacacgtccataatatttcatcctccctcctaatttactttaatatcctcaactttcctaatcgttcagggaatattctcatataccctagacatatgcgtcttttccaatctaaaatgttgagagtatatttttatttatatatatatgagtgacccctgcgagagacaacggccactgaacactatcgatctaatcttttcagctctctccatcgtcgtcgtatctgtgactctcgtgatcatcgcctgaaaaaaatttgagataatggccagaaagttcttcgtcggaggcaactggaaatgtgtaagtgatctttaccttctattgcgcaccttattattagtcttgtcacttgatccttccccgatcaagtcaaagagatcggaaaatcccgatcttaagatctaaggtttttttcattatttgtagcggtggaatttgaattgtaatgcatatggttcagatttgtcgattctatgccggatcttagttgtttttttttgtcaaaattttgagtaggaatttttcttcaattgatatctcgtgttctagctttggtggatccgtgtgttaattttgttggttaaactattttaacatgttaatatttgaatttgtaatcttatatagaacggaactgctgaggaggtgaagaagattgtgaacactcttaatgaagctcaggttccttcacaggatgttgtaggtatgtgtagcatctcaattgctttgacgacattatggctttttttttaatttccatgtctatgaaatcttaagtagtgacaaatattttgggcatacaattacaaacctgtttcaatgtacatcgatgttctatagtgtttatgcttcttaggaaccatggatagatctagtgtttgttgttagttaaaatgttctttatcatatacttgttatggttctatctttgttgatagttataagtatgtttgttcttgtattaataatttgatgaaattttactaaatgcagaggttgtggttagccctccatatgtttttcttcccctggttaagagcacattgaggtctgacttttttgttgcggcacaaaactgttgggttaagaaaggaggtgctttcactggtgaagtgaggtgagattctaaccattggtgtatactttaagctgttttaccattattgcttcatgcagtaaatatttatggttttgaaaatgaatatgattgtgtttataaacgaatcgatttttccatctgttcttcttctttatcttctttcctataagaattgtgtaacctaagtgattaagaaaacaactagtagttggtagtaagaccatgattggattcgtgcctggttagacaagtaggtgtaatatgatttacctgtctatggaatgctttcataggaagaaaagatatattctgtggtgcctgtatttcctgctcttatgcattgtgtaatttgtgtgttttagtgcggagatgcttgtgaacttggatattccatgggttatccttggtcactctgaaaggagggcaatccttaatgaatcaagcgaggttggtgactttacatgataaaataattttctggagactcaaatagcttttaaattcatgattttggtttttgacctctatcctacatttgtagttcgtcggagacaaggttgcctatgcacttgctcaaggtttgaaagtgattgcttgtgttggtgagactcttgaggagcgggaagctggatcgaccatggatgttgtggctgcccagaccaaggctattgccggtatgtatattgtcaaacatttaatctctttttgctatctcagttcgttctcgtttacagtgagacctgttttgatgatagtgatgcccgtttctacgcactatactcccttagtgtgtgattcaaaccccacagaaatatttgttggctaaaaaactctttttgttggtaatggcagatcgggtgacaaactggtcaaatgttgtcatagcctatgaaccagtgtgggccattggaaccggaaaggtcgctagcccagcccaagctcaagaagtaagtggttctcgatgcgcagttgcactgtaacgtgttgcatatggtcatgatttaataggaaaaccaatgctgttttccttacgagagcttgtttcgtttatgaacaggtacacgatgagctgaggaaatggctggccaagaacgtgagtgctgatgtcgctgctacaacccgcatcatttatggaggtagatagatgataacacgatctttaattaaacacccctatatagttttctatgttacttagcttgattatgcaaattattatcaggatccgtcaatggtggtaactgcaaggagctaggtggacaggccgatgttgatggtttcttggtcggtggtgcttctctaaaggtacatataatatggtttctcttgtaatgatatctttcgtttgtctctttcaaaaccatgactaatgttttcattcttggtctttttgcagcctgagtttatcgacatcattaaggccgcagaggtgaagaaaagtgcctaatgagctcattaagcaatttaaaagtcctttgcttttccagtcgcaactctgaaaaaatgaataagttggtattatgatatgatacattttgcttcagttgtatttggcaaaagtttctctcttactatattgttttgagaacgcaacaatcattttcttcgccatttatttagctgtggacttgcaatttgcaaatcccttccttttacagtcttctcaactcttcagagaatctgtgtttggagttcataacccctcgggccttttgatcaaacccctatttctaatgtcgtccgatcataaacctgtgtgttatataatatgttgtttgttccattttagactttggtattttgtcatgcttgatctctgaatcatgctgtcaaccactttgaaaatggctttacttgttaaataaatgacgagagaatacaggagaagtgggaaatgactttattttttcccttttatcgctttttgcctattggtctgtcatttttgacattttagcttttagaacattattattttcaactttattgtcatcatcttgaaaaatgtccaacattacgaaattattatgtagagagtaaaaaaggaaaagaaatttcatggagaaactcattgtattaggaatgtcaatgtttgtagaaaacaaaatgcttatgtaatttgagtaaaacggctcagtggaactaaagtgataatgtaaaagagacggttaagtccaaaataagagctcccgtatgtcagaattgttcaaaccatttattaaaaaattggactcagtatgatgaaaatgtgtatggattttgatccgaccacgaaaatccaactagtgccaataaaaactccacaatatgtgactcagctacaaatgtgataacgtattatctcccaagtcaacccacatttctggtgacttatattttatttatttctgagtaatatttaagaaagtagggattgaatttttatgagtattatattatatagttgaccttggacttatttgcgtaacgagcaaacaattgtgaccttagaaatggaggtttgactaagtcatcgatcatttcagcaatagagtaattttgggtccgtatgactcaaaacaagttttggtaaaaaatttctctgttttaaaaacttgtatttataaaacttatgtcccatcccatgatactaaatttaattacattatacgtatgtagtcaagcataattttttcctgaaaaatcttatttttcttacctacttgtaaactttaatttaattcctggttaagtagatatttttcttagttcttacaaatcttatattttcttacctacttttataaacatttttgagaccactattactaaacccgaatctgtttcatcattccacacccaaagcatataaatcgaaaatatctatgatcacatgaatatctatcattttcgacaaaatttgtccttttttttctttctttttgtatccaaccccaccacggcgaatttatttcaggcctattaaagattccaaaatctcatgaccatctgactcagatgtcatatctattaaaaacgttattttgaatcttaaacatatatcattagtgatctttttgcacgtttactcagatgcttaagatcatcaaaatcaatctatgaatttcaaaagttttaaaaatcatacaatagaaaagtcccactgatcattaaattgttattactaattttatttagaactcgtttattatcttttggtcaaaaatataacttttgtctgaattcgttttttttttgtttggacaagaaaaagacctttcttcttccttcggttgcctctaccatctcatcaacacacatcttctctttctcttctctcatcctctctcttcttcagtgtttactttttctctttctcttttttttttctctttattatttcgctttaatgagttttatctgatagaatctgctccacccaaaaacagcataagaagaaattcattgtcagagaaaagtgcaaaaaaaaaaaacgatcttcttcatcattctactaaatgggttcttgtctcagttctcgtgtccttagtacgttctctacaattctccatctcccatttttttttttttttttttgtgattcacacatgtgtatctcttcaaatccgtgatctttttggttaatcgataatggcttttaagaaaaggaatgaaatttgcaagaatcttcttcctgtgatctaactgaataaagttttccccttttttggcgttctctcaattttgactgtggtcaacgcttttgtgtgttgtgcagataagagcagtagtggtctcgatgatcttcatctctcgagctgtaaatcttcatcatcagctacagctcataagacagaaggagaaatccttagctcaacgaccgtcaaaagctttagctttaatgaacttaaactcgctactagaaacttcagatcggactctgttgttggagaaggtggctttggttgtgtctttagaggttggcttgatgagactactcttactcctaccaaatctagctctggtcttgttattgctgttaaacgacttaaccctgatggttttcaaggtcaccgagaatggctggtacaacacttgtttcttatctttgatttataacactcttttgtttttgtgtgtgtaggttctgatattgatctttttttttgtggtttcagacagagattaactatttggggcagttaagtcacccgaatttggttaaattgattggttattgcttggaagatgaacaacggcttcttgtgtatgagtttatgcacaagggtagtcttgagaatcatctgtttgcaagtgagtctttgatctcgtccatgttttgtgaaactttgagaggttgtttgttcttatgtttgaatgatttttttgaagatggaaataaggattttaagccgctatcttggattctacggattaaggttgcacttgatgcagctaaaggtcttgcatttcttcatagtgatcccgtcaaagtcatttacagagacatcaaggcgtcaaacatcttactggactcggtattcttctctttcgatgtctacttgttgtctttatcaacgacttaaaagatactgagttttgtctttcaaacaacaggacttcaacgcaaagctttcagactttggtttagcgagagacggtccaatgggagaacaaagttatgttagtacaagggtcatgggtacttttgggtacgcagctcctgagtatgtctcaacaggtacattctgtcactaagatatgatgcaagtaataatggttggataagaaaatgtaagactgttgcatggtgcctaacactggtttttaatgtaaatttgaagatagcaactataaaatttatgtggttaaaggagcatatgggttgatagctagtttcgttctctcatctttctatcttttttcaggccacttaaatgctagaagcgacgtatacagtttcggggttgttctgctagaactactatgtggaaggcaagcactagaccataaccgcccggccaaggagcaaaaccttgtggattgggctcgaccatacctcacaagcaggcgaaaggttctactaattgtggacactcggcttaactcacagtacaaacccgaaggagcagtgagactggcaagcattgctgtgcaatgcctatcattcgaacccaaatcacgtccgaccatggaccaagtggttcgagccttggtacagctgcaagacagcgtggttaaaccggccaatgttgacccgcttaaggttaaggataccaagaaacttgtgggattgaaaacagaagacaagtaccagagaaacggtttaaacaaaaaaaccgttggattgtagtaggtagagggaaatataaggttacttggttaggtactcttcatgtcttcttcttgtgtattgtaatattgtgcgaagtgattttgacattttgtaacactgcttatagttttgctcctgaaatattcgatttggagatacttgttttctctctatctatagtttggtgatatatgccaaaatgtggtagtgatcaattccactctcttctaacattttagtttactatatatgtaactaatttctgtcaagttgatttgtttttatgaaaatgactttaattagtatagttgatgattgaatcataaataacttgtagccaaaaacagacagaatagtacaacaaactcataatgtaacattaatatcaattccgaagttcacaaaataccataaatatcaaattccatgaacattgtcatcaaccagaaataaataaattttacgttaattaagccaaaatggatctcgagttaaatcaatatcaataactattcaacatagccaaataagtcactattttagaacaagaactaactcaatttgaggttttcaaaattcctatatcaatttagaacgagaatctccaaaacacaagtcacctcagtaaacttatatatttaagggttactttgtttttgtcataaatgttaaaagttactaaaactgttttttccccaattttttttactgtttctctaattgtcaacaatcaacaatctttccctttttccatttaaaaaaacatacgcgaaaaaggaaaaaacgcgataaggccaaaagcccatttaataaatgggccaagctctccgatcaatagaaaaagatctgtcttcttcttctctattctctgatctctcataagaagggcttagggttcacttcagatctgtctttgaacattgctactctcaagtgatcaaattaactccgtcgcaggtaaattccacaatcctccgaccgtaaaccctaatttatcactgttcttccaagaaacaagtttttgttttgatgaaattgaggatcttgcgttgaaatcgttttgtttctatggtaggtgatgaggagatacagtccgccttattacagtcctccgaggagaggatacggtggtcgaggtagaagtcctcctcctcctcctcctcgacgtggatatggtggtggtggtggtggtggtggacgtagaggatctagccatggaagtctcttggttcgtaacattcctcttgattgcaggtaaattctcttcctttggtttaaagttttgattttgttttagtttatctttgaagatttcgttgggttgttgttgattttgttgtttttgattttgtagaccagaagagcttcgtgagccctttgagaggtttggacctgtgagagatgtctatatccccagagactattactcagggtaagcctcctctttccttctcgatatcttgatctttttcactgtacctgaaatttgtgctgcgaattatgtcttttgaggtgtgaatcttttatagatggactagttaggtaatggcttagcatatgattcttgttttcctgtagaatttgctttctttacgattgaaaaatgctgtctaaacactttgctgcttcacattcaatgctgaaccatttgttttgattaaaaaggatgttcataagtcttcaacttgtgcacaaagtgaggaaaattgcaagtgacatatgagttttgaattttgattttggcgcaacctgtgcatgttactttttttatacactccactttttgatcgagctaagttctcgaggtgagaagaggtccttttggttgagttctcgattttttcagagctttttgttttggagttctttttttcatagtaaattaaacattccactgatttcccagggggtatgttggcttgaagttaaaacaagaccaagccccacatttgatgaaggcctcatgaaaaaaatcttaacttaaggatattaagggtcatttcaaatcaagaatgttttgtttggaagcaagttatatgtgaagcatgttttatttggaaggaagtattaagtgaagaatattttgtttggaagcaagtaataagtgaagaatgttttgtttggaagcaagtagtaagtgaagaatgttctgaatggaagcagtaataagtgaagcatgttctttatgaagctatacagtaaattactcaaaaccttagaagttttttggggaagacgacctgaagagaacttaagtttgggatcaagtgcatcttatttttacaagatgcttgcctcttttcgagttgatatgcttgaactgttatgaaagggtcagctactaatcatattagcgtaagtagaactctgcttttcttagaagttctcacacgatgacgtttacttagaagttctcagaagctgtagaatgtaggctgattttgctggtaattctagatttatctggtgttttgtgcatttgctttcaaccatcaaccacttggaatgataagcttctgataaatgatgcaggcaaccgcgggggtttgcgtttgtggagtttgttgatgcatatgatgctggggaggctcaaagaagcatgaacaggagaagctttgctggaagagagataacggtggttgttgcttcagagtctaggaaaaggcctgaagagatgcgtgtgaagactaggactcgtagtaggtaagtttccatatttctgattgcttaagcaaaagagttatcaatcaaatcgctcttcgtgattaatgctctgcaagttatccatcatttatgaaaagaagttgagaaggaaataatcgttgcgttgtctcaatttttcagggaaccttcaggctccagggatcgttctcatggttagtaattttctctctggttatgcacatgttatgttctataccagcaaagtttacacaaatattagcacagctagattgggacgcacttgtttatacacagcttgagaaagcacttgtttatacatgttctcatggtttgtatacacagcttgagtatgtttatgattttttgttctcaggacggtctcgttcacgttcaatctctcgatcacgttctccacgtcgtccgtcagattctagaagcagataccgatcaaggtaacatgcttcatcacacatacatttccatcatcatcaagtcaacaagaagtatatatggttttagataatggtgttacaggtcttactctcctgcaccaagacgaagaggaggtcctcctcgtggggaagaagatgaaaattacagtcgtaggtcctactcccctggctatgaaggtgctgctgctgctgctccagatcgggacagaaatggagacaatgagattagagagtaagtgaaacatggtgtctgatttgttttgcccctgaagattgtgtctgatttttcgtatctggacattgattggtcttaatagaaaaccgggctatgaagcagaggatagacgtcgtggtggaagagcagtttcaaggtcgccatcaggatccaggtccaggtctgtggaggtatctccaagatgaaacttatgtgaagaagtggccgaccaaaactttgtgcaacgctttatgggttttgcatttctctagtagtgcgtctctgtgtctttaaaaactccttactctggcttgtcaaagatattttgtcttgtgatgtgatgttacttgaaatcggtttcggtttattgggtcttattataaaattgtatgaagaagattggttatgcttttgatgtgagacaggtttaaaacccacaatgagcgagtaaaccaagtcttctctcgtatggtcgaggtcgagaattgcgacctttttttgttctcgagcagcctttgcagatatttaattaggaaagtcaggtctaagaatttctgagaagaagagaataaaaagactcattcatctagaagaagccataatgatgttttattgggtctgttttgatcaaaagtccaaagacttctacttttaattgggttcgtatacatttttcaagcagccaagagtctttccttaaactaagtaagggtaagatggtcattttagcttagttgaccagacttataaactttaggttttgcctcctgttacgtaataatggtttggtttggtttgatcaagtcttggaaccacgacgcaggttatgtttgaaaattgaaaaagagtaaataagaatagtaaaaaatcattatgtgaacgagaaagtctgcgtgttcttgcttctgtatttaaagactttgtctgacacatccacttcatcaatcgtttctctttctccttcttcttcttcttcttcttcttcttcttcttcttcttcttcttctttttctttagaaacaacacaaaccccaaaaacttaaaaaataactctacagagatggctgttggaatccttgaggttagtctgatcagtggcaaaggtctcaagcgctctgattttcttggtaatgatctctctattctctcagatttcgtatcctttgatcatttaaaaaacccttttacaacaatttatatttttcttggttttgtatgattgtaggtaagatagatccatatgttgagatccaatacaaagggcaaacccgcaaaagcagcgttgctaaaggtaatttaacttgctagtttccttctttccatatttccaaatctctatcagcttaattcgggttatttcgtttgactttttttttcgttttatgcgagagagactatttctccaatttcatcattttcttttctatatacttggactttaggaataaaaagcccacatgctggtgttagttgatggttgtacataaagtaaataatagttgcaacttgcatccattggtatttcaactatcctcatagccattacatggtagcttaggctatactatttattcgcgttttgataacattcattatcttttatcagttataacattcatcaggtttttacgttctgatgatgcataagttatataaatgcatgttttaaaagtgtaacttgaaaataaaacaatcaattttccaaaaactagctaactattgttcgtgattattcggcaaaatttgttcatcccaactctcaaatgctttccgctacttttatcatttcactatttgtcattacactattttatattttgagacattttgtggtagcttgcaagtttgttttcatgtatatggtttaaatcttgaaaaatgttgtgtatggatagagctttcttctgaaagtagtcatctcatttagtgtgatattgtctggccaaccttatttttaactaatcaccaactaatacaccaaactactagctataagaaataatattttcatttcctacaaaaatgggtagtgaaatgtgaaaactactgtgatgtaaacaatcctcgctagacttggttaatgttttactgaagaaaatggtgttttagtgagatattgattgcacggctttaatcaaacggcttttgtctactttaccaataacggatcaaactggacaatgttcttttctcattatcatatttcatgtacaaacatcgtttatcaaattttcatcttttttgtttacttaaatgaagaagatggaggtagaaatccgacatggaatgataaattgaaatggagagcagagtttcctggctccggcgccgactacaaactcatcgtcaaagtcatggatcatgatactttctcctctgacgatttcattggcgaagccacgtacgtatatcacataacatgatagccctaaactatacataactgaaatcgaaaagaaaaaaagaatatggactaatcttgattaatggaaatgaataaatagggtacatgtgaaagagctattggaaatgggagtggagaagggaacggcggagctaaggccaaccaagtacaacattgttgactccgatctctcctttgtcggcgagcttctcattggagtttcttactctcttttggttagtttctttttacttttactttctttttttttaactaaaatttatttactctctgattgaagtaaactctttactttttgttgggaattttcagcaagacaggggaatggatggagaacagtttggaggatggaagcatagccaagttgattagtttggtttcttaaaactgctgattttatcttcttcttctatctttagtgtcaacatcattaagatattcataagtacaaaaaattatttaaattaaaatgtatcatgatttgttggttgtggggaatcttcttgatttagtaagagcatgtgtatgaaattgaaatctcattgtatttataatttatattttacataaatgtatcaaaataatgttataaaaaaaaggattggtaacattttcacaaggtgacaaaaaaaagatcctcagttttgatgatcaagtggctgaagaagacggctcaaccatgaaattagctatcctgttcaacaggtttaaaccaaaaaccgtttcttcgcaattgatcttgactgttaaattcagaacttcggtgcatttgccttcgactgtgatggtaatcaaaagagggatctcactgctcaagattttgctgctgaatcttaatcgcagaccagttgcatcttcgagtgagtttgcaactggtaaatccacagatacaaggtgtagatttgagttgctaagcacctttagtgttatactctcgcagatgctaagaaatttgtctttcccattctccgttcttgaatctttaacatgatcgtcaaaagtacacctaccaaaagtgaagagaaccacccaggttaggaaatcagtaagtgaagtgaacatgatctttctgaaaaccttttgtgcagaaagtaaaagtcaaagtttcttatgcatcaacctcaagtttaagtagagaaagcagctaaccttcgactatactcaaacattccaggtaatcgagattctgtagctaagaattcctcgatgctcattgaaaatggtttcacaaggtatccaagatcaggtcgtaacttgacaggaactttcttttcattgtaatgtaaggttaacctcatgggaagcaggtggtgatgaaaccgaacctggataagcctctttgtgctctgatgtggttcaaggcagctaatttcctccattggaattagggttggtatattgttgtaagatgcactgcagggttttcaaaaaaaaaaaaaattgagaataatccgagaaaattgaagataatggttttctaccaaaactaattgcttggaggattaaggatgtagttaggcactatcatattgggtaagtgatagatggattaggcaaaaagagggttttctaaatcaaatacgtataaaggaatcaaactcactttgctttaccaaccaatgtctgttcagaagagtctgctaccttcattgattcttcatcttccaaattcacctccaggataggttcagcagaactgttctcaaacagaacttctacgcaaacatgtaatggagatacattagagacttcagataaaaaggcatagtctaccttcaagccactgccatttccagggtctacgagactatagcttttaggcttaactcggcttcctacatcaccaatggatatcttcgcataagagctctgattactatttaatgcagatggagtttggtttgatgtactaggctgatcatctaaccacaaatccagggcccttctggaccttagttcttcctggtcagcggaaacagaagtctctgaaatttgaattaaaggagcagctgggtcattggcgtcattagacactgttctttcatcaccttcactgctaaaatccgaaccattagaagattcagagtcataatcagaggagccattctcatcccctgtttcagaggattcctcagaaccatctaaatcagctgcggcctctctttgtttatctaaatctgacagctggtcctgttcttcatacacaaaactgcagggctttggaagaggttcatatccaggggctgcatgaagaactatctgtgacagagatccaggaagataaaaacgattgtgcagggttataggtgaaacagatttcagttttcttccaaagacatgttccacaacatgcgcagcaatattttcttgtgatgcaacactgtcttctgccggctcatgactagctaatttgcatgacagcagtttcttcaggaaacgagttcgatcacgaatatcatagcttaagtcatattcgcccaattcaaacacatagaccacaatccttttcaacatatgaaagtcaccagcctctgcacttattagaacctacaattacagtgataatttgatcaatatcttctgactgtagtgagacgtgccacagtaaacgtactcactagcatgaaaagtaaagattttcatagcatgcctaagagatttcaaaggacagacaaatcataggatgaaatgttatcattagtgaagaaatggaactgactatttcagagagaagaaatgataaatttgttcaagtaacagaaatggaaatgtcctttctcatttaaccatatagcctttctttcaaaggggttgatgaagaaatattatattattgaactcagaataagaagtattgaggcaacgccccaagctatataccttagcaatagtattaagaatctgtagttttgtctctgatgcctctgatttaaagctccatgcaaggtacttggttattgtggtcagcatcctaggaatgatatgacccaaagagcagtagacccccaccatccaaataatagttgcacgagcagcagctaccttgattgaatccagactacgaaacagctgaattaacaccttcaagcaaccaaaatgaacaagaaaaaaaaaatcaatacattattgaaaatagatgtacaaaaggagttatttgagatcattgcagcaggttccaagcatgtttttaagaaatggtacgaattagatgtgcagtcagtggatgatatgtgtgtactttctcatgacgaagggggtctcgctctatcatagtctgaattgacatcacggcttgcaccaatactccagcttctccatccgcggactcaaaatcgccagcaaaagattctgcaacattgtgagagctacttaaactgaactgccaaataggttaactaatgaatgcaattaaaataaagcataactgaccctgtcgaactagtgctaacaatccatcaagacatgtagttggaattgtcatcagtctttttgcgcacaaaccaattgctgcaactgtatcagccgcaaatctcctgtctggatctttaatataatcctggaaaaaacttaaagaatcagtcatgcacacatcattttggccagaaactacagtacagggacaaagatgacgatccttatgtaacaacactttaagaagtgcttatttatatcatactggaaagtcaaatgatcatacaaactttccagaatgaaccaaaaaacttctataatcgatttgacagataaagtagagtacctcaaactctctcaaaattgaagcgatagatgaagtggtagcaatgagagaaagcatttccagcttgtatgctttcacttgatatgcatctgaggaacaaataaagaaattttcgaagtgtggagcaaagagagaagggactgctttggcaaaaactaggatattgcagaggacctgccacaaatatgaataaagcgatgttcagagagcacatttcgtcaagactacacagcatgtgtggattggactaaacattggtgggggaataatagaatgttaccacatatttggaggcgctagatgacctaagcaaaaacaagagcggtttaacaattttcttaacatcttccagaggcgccattatccattgaacgccagctgctgctagtacaaccgcactgttattactccataacaatggagatgtacactgaagcaggatcttaacatcttcattatgtgcaatagatgtggtctctttggtatcgaaagcagatgacactgtatcggtgcaactggatcttgatagatactcatctggaccttgaatgtaacatttagatacaagactgaccagattaacatcaaatgaatcacttttaccaccatcttctttatccaatgtaagatctctgcctaggccatccttctcacagaagccattactattcgtaccatgtatggacaacatcaaagattcccgtacaagtccatgcctagcaaccacatagcgcaaaagagttcctatgagtaatatctgaccccactcttcaacgtcagggagaatctggcacaacttcttatagttcttcccaatcagtttgaagttatttggacagatagaggtgaatgccgctgccgcagctccaactactcctggagaatggtcattcaacagtatcccaactagctgcaacaaggttataatcgtttcattgaatatctccattcgcaaccaaaactcctcaacctaaggatattgacaggacaaacctcttcaatcgcagaagcatgttcttccagccgcaaatcatgcaacttcggaagagcgtttgcagcacatctccgaacataaacagctggatctctagcacatttactcacagctgcaagtgcaagaggtgcaataacatgtaagcgaatcccagccattgtacgaagagcccaagccctaaccaatggatttggatcccccaagtccttttgaaaatagttgatcgatagcaatgcttcatttggacgcctacacaatcaatagaagctaatcatgtagatgcccaaacaaaaagacatttgctgaattgaattcacatacttttctgcatattgtagcaaatacaagtaaacaagcttcttcacttccgatgactgtgacgccacattcttcaccacctgccattaaaattcgtccaaaaattgtttcaaaatcggagcaacaattctaggatcaaagggatcaaacaaaataaggcaaacacctgaggaaagaaattggagacatcaaagccttgagcgataagagcaaggagacgcttaagagcttcacatttctcagattcgaacttgctatcgagaagtggagcaatgttgacgtcttccggatcatcataaagatgagcgtcagtgccgatccgaagcaaccccagctgaagctttgctaagagtctccgacgtcgaaccaaacttattgaacattccaactttccgatcaaatccgattccgaaattcagagagctgtgtaagagagacagagacgatgagacgaacttttcagaagagaagcctgtgttaggatgatggaatagccttatccagaatctggattggataaaccggatcttactaagtagatcctaaaccggtttgataatccgaataaagcccatcaagaatgggctcttcaaaaccctaaacccatcttatatttatacgcttaagtcgccttcatcttcatgtgattttcttctgtatatgctttcccgaaaaatgaatctgaaattttgttttgaatgagtttttttctggaatttaaaatatttgtgggcgatgattaaaaagagagaggcttgagaggtgagtgtgaacaaaactctcatgggatggaggaaaaaattcaaatcgaaatcgaaggagaaatacatttaataaaatgtttttttttcccttttttgatttagggttctttctttcatacctttccctcggtgacggtccttccaagttacacttgatatgagcccttctactatactttcgtttaatttttgtgttggatgtggtgttcttacttcttacaatgattccatgaaaatgtcggttaatttgtaataacaaaactcacacatgtaatatcagaatcgacttctttaacaaacaaaaaaaaatatcagaatcaacttggccattctttgaagaattgataacaaacacaatcgattaattttgagagaaacattatcatatggcattgttattggtacgaagaagcaaaactgaatcaccatttagatatgaatttgagttaaatgaagagcacataattaagttaagtatcgatccatattgcgacgaaaaggtttgcaatttgactcaaccataatcaaatgtatgttacccagttacatcattttgagattgttatatgctacaatcaccctattggataattatgataagaaagagttatagggaacttaattagaatccttgcgttttcttccgagtattgaagctctctggaatctaggaccacctgttctccacttcttgaaggctgtcatcgacaagtgagctgcttcatacacttcaaaaagaacacagaaacaaaaacagattgttaattttggtacaagcttgagatggttaaacactaaattcactaccattagagttcaaaacataaaggctacttacagtttgtttcttcttttgttaaaaacgacaagtacttggaagctgttatgtgagctgctgtgtatacttttgtcagtgcctctttgtatctgatcttaaacgcagtcgatagcaagattcccagtgttctatctgtgaccctgtttagaccaaaatcagtatgattaccaccacagaaaatagctttactttaatccagacactgtaaaaattagacaacttgcttgatatattcatgctcaattcacgttgaaatctttctacaacagctatctttcccaaggattagaaattgacaccagaaaaaccgacttttgttcttgaagccaagagataagacaacatcaaaatgaaggggaagtgagtggacagagtcttaaaaggaggaactcacagtggctctatcttgcatccaaattcataaaagtatggacatcgcgatctaagatcgacgtatgcagcatcagcctgaacttcaagcctcgtcctgcacaaaacaaacaaagccatgaaaagactgctacagggtaaaagaagcaactgcttaaaggccatctgaccatagatgcagaagaaaaagaaagaaagagaatcaaattgacaatgccaacattacagttaagctacagaatgcttacttttggtcaaaacagggaggaaggtttatggtaacagcttgcctcaaatgcaactcatgagcaagccagaagggaagttcaactttagagccttgttcagcctgcaccagaaaatctcacaaaaatcatatcagaaaggaaaatatgatatatccattacaaacttttgcactaggaaggagaatactgacacaatttgtttctgcacttggatcaatagtcactccgtttgctgttttatggaataaaaccggtacaaactgcaacaaggtaacaatagagatcagatttcttatttgataaagagagcctaaagcaaagctattggagaagaaaggtgacctcttcctctataagtatgtcatcaatgtcaaagtacttcgccatcccctaacgctgatttcacaccaccttaaccttcagattaaattcgcggtctgcggggagttaaaagcaaaccataagacactcaaaagtcaaaaatcaacctcttaatagattgtcagactcaaatctgagatttcagatttaccaaagcaattcaaaatcaattcaaaataagaaagatgaaagatatagagcacaaatcaaacctttactcacaaacgaagaatagatcgaagaaaagattgaagaagaagaagagagtgtttgaagaagaagaactgaagaagagaattttatatcgaagaaaaaaaaaacaattaagaaaagaaaaaagttttaggcccagctctattgaagcccgaaaccttttcaccaaaaccctatataagcccgaaattctcttttttgattttattagggctagggcttttaatttctttagcggactagtgccggccctaaatgttaagcccgttttaacatctctaattaagagagtttagaacagtagtaacaagtccaaattcataaaacctctctcctctagttaacacaaatggctgttaaatctactcaattcagtaagtaaatttgtacaatataaagtccaaatctattcaaattcaatgccagttctgagagaaataagggtttccacattcacaacggccgatttgattccgactaagctaggtaaagtttctacaatagaacaaaaaacgatttaggtctacggattgaaattgacgcaaaaaccttagagaaatgggggaaaacttacataagaggaatgcaaaacacaatttgttgaagagagaaatcggagatgcttgcgttggaggaatcaattgcaacttgcgagagagaactcgggtcactcgcttaccggatcgaactgtataagatcagtggctcgacaatcaaaaaaaaaaaaactattactaagtggaaaaaaatggtgaaaagaaataataattctaaaatatatttgtattgtgaaaataatcaaatttaacttagtgattttttcgcacaaaaaaaaaacttagtgatttttaaaaaaagtttcacatttcttatatcaaagaaaattcaaacttgatataaattaattgattgcataactaaataaatcgattcaactcgatagagaagatcaattctaaactaattttagttgaattatataactcatgtcaacaatgtcttaggattcatggtactactcaagagttactgtagtgaatttcataagacactcagtgttacaactctgagaaaaatttgcatagaagtaagatcattgtgctactactattgaatatatgaattaaaattaatattgtagccacatttttcatgctaacagagaaaagaagagaagatcgaactttagtataagcaagtggtagattatataatgaaatttgacattacaagcaaaccatgcatataattttaagagctgcgggctgtttacaacttttatcaacagccacttcaacttgtctttcttacacttcccaataattaccacataactccccagcacagtaaaaagcttaatagaaaaatacatagtcaaagatgtgcaaatcgaaagtggagcttctttttgtctctaccatttcgaatgtttcggtatcatcaattcactttagaccctgaaattctttccgacaaaggtttgtccaaactgccagttcgaaggagcgatgttccatgaagtagaggttctacgatcgctggatgtaacacggaaggaaagtgactgaccaacgagaacagcattagactgccagttctgtccccagttcctagttaaactcatccaaccagtctttgaacctttcacactcgtcctcgcgatgtctcctgctccggccacgttcgtaatcagcaccaagttgaagtaacggtgaccgttgatcgtgaaccttatccctccactcttcctacatgccaccctatacaaatacccacatttcgtaatcttagcattttgattcattgcatttgcaacttcttttatatacgaatcatttctcaaatcgtaggctacatatagggatgtttaagtatacctgcggtaagagatggggacaatgccggcacgatactcagcgatcttgaggaaaacgggcatggcgaggtcgaaatgagagcgtggcgggttgcaccagccaccattgtcgctaggctgggctaagtttggagggcaaaagttggttgcggttacgaagacagaaggattacccgggtgacaccatttgggatcattgacacatttgatttcgaagcatgcgccgcagctttgaccactgttaaacaacgatgtgctcagcgccgccgtgtttgttccgtatccttggctatacagattcccgtatccacacgcgccacctaaaataacaacaacaaaaacaaaagtaaattaaaggaacaagaaacagagcactctgttttagagagttggtataatgataaatgaagtatggttcttgaaatatgtgtttaaggagagtagactgacccattgttcccgaagcatcgtttccaccgtagaaagtggcgtgagcggtttgccaagaaccacctgagaagactctagggattccggcgtcggtgaagctcaagagaaggaagagtgggaatatggttaagagaatcaatggattgattgccattttggtaagtatttttaattgaattggagaaagcttgagaaaattgttagactagaaggcttagagaggaacttgaggatggtggaaaatacacttgtgaagatcgctatttatattggtggagagaactccaaagttagagaaatagatggtactggccgaaattagtatttttctagacaaatatttagaaagtagatggtgaaaatataggttcataaccgtttgtgatctttttattattattgcaatgagatgagatctttaatccgattaactctgggatctattaataatacaatgtgagattaacttcaaattaaaatagcttattggaaaatgtccaaccacgtagaaattatatcagtcatacaatataaactaacaattaactggttcgttcttgaagcaacgatgatgaaataattaaacaacgtaatagagaatttgagttgacatcatatgcatgactttgtctttctagtgttcataaaataatttcgaagttctaccaaaaatatgaataatgtgcatatgtataaactctgccatggttgaacaaaagtttatattttcgacgcttttcaaattaatacattgatactttaggtatatacgccgtacacagcacgtctacgtagccaacttttgtcatgcatgatgcatttatacaaatcgagttatttgtaagtaatatcgtaaatttctatttaaatccagtgcaatatatttttatcattaaaaaatgcaaatcaaacatgaagcatatgaaaaaaatacaccagaaccatacattttatatttaaaaaattatctacaacaactatgcaataaaattatgaaaatgtaaataatcaatccattgggatagttttcataattaacaataatatgttggcaaatcgaagtgagtgaagcatgagatggaaattaaaaaagaggaaaacagttaggggcggtgacggtggaagagcattaacgacatttggtgatgacaaagcagatctatgcaccaaccagatcttgtatatctgccacatcatccacgccagcaaaaaatatacatacgtgttatgtttaattaatcaaagtttatagcttctcgtggttacagatttttctttctttttttagtagatatgataatgtgaaataactataaatcataagtcgtatctaatttagttaaaattaaagtgagatacatttgacataatagtgtatatatacgtgtaattagtgacgtgtattatattttttccaaatgcacatgaacgcatacgtaaccacttgcatgtgaatttattatctacctctactctctcccgacgatttctcgtcttttcatttatttcattctttatacaaaaacagttttcacttctagttatgtctatctattgttcttatgtattttattatgtgtatatagatgccaattctcaatttttcatctccaactaacaaaacaacttgacgatcgatatgctaaaacattgtaaggcatgtccgtgtgtattgaatggtatcacagtctacggaagttgcacattaatgtggaaaaatgtatgtcgaacaaatataaagtacataaatagatctgacccactgctccaagaggactagggtctagggcatgtacggcgtacgatcatgtatttgatcatctgacaatgaaaacatgatatatagcacaacccaaaagatccaatctgatatgatatatatatatatatatatatatatatatatgaatccaaatatatgtcaatgaaaacatgatatatagcacaacccaaaagatccaatctgatatgatatatatgaatccaactatatgtctttaaaatatcgattcatttcacatatattgagcaagtatagtactcctatagtctcctactgtatatgagttaattcacttattaagttgttactattgaactttgacatggtattagtgtatggttattaatccaagtaaagtttgttatctaatcctaaaatgatttataaaggaatctttgatttacataacacttgttctttgatttgatttgagaaacgtatctaggaacctttgttttgggaagaaaatgatgtgtgcgcttaattaatactaatacaaagcgctgaaatcatgaaataatgtcacaaacatgtacatgcgcagcaattccttaggcttggaatacaagtaagtatagatgctaattatgaactccaaatcaagcaatacatgaaatcatacaaaatgatttataaaggaacctcggattttagcttaaacatgatgactttttatgtttgtgcataaatgaatctttggtttatttaaattaaacatgatcctacatatatgctccatcgaaatttgaacactaatatcatggacaaccgatgagatatttgttaattagaattttcttaagaaatagctaagaaatcattctatagagaaagatgtaatcgaaaatgtaaaataagacagattttaagttcaagatatagtattgagtgttatatatatcatctctaattcacttttgacaaaactaaaattaaatctgacacatagtcacactgtttaacataaacagatttcacgagaggatttgtagcataaatttgataattataattttatcaagtaaaaataataaaatacctataattatgtcgcaccatattcactacaattgtttattctccaaaaacaaacaatctttttgctgtaaaaatgtttagatttttgttaattttcctttttttttgtttttggtttacagattttgtttgtatagacaaggtcgggctgacccggatattcggatccgtattgtcgtattgacaccgtgaacccaaccaaccaaaaccctaaacccttttttgacttgtctctacttgttacttcaccgccgcgttctcagtctctcaaattcctctgtgctttcgattcttaccagtgaatttttcttattttacttatcttatgctcgtatttggaggaactgagcaaaaccctagttgtttaattgggtcaaatttgtagattgagaatccaaatttatcgacctagttattgaatcccgagttgatacctagaaacccttttgcagtcgcagtaaaatgggtaagctggggaagaaagctaggaaatttgccaagaaaaatctccagtctgttgagaaacgaagcagaaagctcaagccttttatcaagaagaaatttgcaaagagtaagttattcttcgctttcacttctcttatgttccctttttagtgttggaatattggatacataatggttgtgctatagttgaaagatttgattttttattgtactttgtatctaattttctcgctgattgtttagagccaatgataactttctgtggttttaggaaatgagcgtcaccaagcaggagataaacaggagaagaaggtagagcaacaacctaagaagaggtaagagttttgactgtgtagctgtacagtcctgccactcaaacatctgtgtgcagttatccgtttgagtttcttgcatacgctgcttctctgttcttactttatttaagtaaagtttgctccatttgcctttgtgtttcattagttttttaaaagattgatagctcgaatattagttatgcactgtgtgaaatgatttctcgcctatacgttttcagatgtcaagaagaagaatttcaggatatagcaatagatgcagtattcggaaaggatgatgatgaagttctccgcgatggtgattcagatagtgatggatatctggatgaggtatttaacttagtgtttggtgaaaatatgaacacaaattttgttttagctattttctgttgtttcaggttttgttagcatgctcttattgtttatacagcaaagtaacattgaaactatcaatcatcccatgcagttggtaaatgaaactgactcagatattatgaagtgcaaagtactctcaagatcttttttagccacttgctgtgacatggttgataaggagcagtatgttccagcattggttagattgttaaattggtatcgagctgcatgtcaatatgggcacgaaccatcagggattgctaggcctaatatatactatgacatagaagacagtgagacatttgccaaggtcataatttttgtcctccaaaaagctgatcacacttttaggagtatcctgggattatcagattccagtactaaggagaagattttgaagttgaagaacaacccaaaatgggatagtttaaaaccactggtcaaatctttctttcgaagtaccttgcatcttgttaagcaggcaggagacttggagataatatcttttacccttacccaacttagagtctctatcgtgtttttggccgcatttccagatcttctgaaaaaattgatcaaggtacactctatatattcactgtctaccacacaggaatttttttatatattggactacactcattaggatctaattttgccttatctttttgacggcgttagaatatcattagtaatagtatatagagagatgcattgacaaatcttggtttacatcctaatagtagccttgagtaaacaatttaggtacttttctctaattgacattttttcccaatgttagatatgatgtctctttgtttcctcgaaagtcaagttttgttgtgtaaattggtgcagatatctgttcatctgtgggtaaccggtgaagagactatatcgcagcaggcttttctaatcttaaaagacatcagtatggtttttaactcggaatgctttgattcctgcttaatcaacatgtacaaagcctttctacatgactgtgatattccaaaggcaaattcagaacaacgtccgttcctcagagattctcttgttgagctatgctctcaagatgtgcagaagtcttataccaaggcctctgtttctattacacaacttgccaagttattgaagatggctctcgctacaaagaataaggtgcttcttagtatttgcatgctttttcttctacttaaaagttatcttatttgtcttcttagcctctttcaatttttgtaaacaggaagctgttgaaaagatacatagtggggagtacataaattgtgttgatctctgggtaaattttatttctgccaacgttcaggattgtgatctccagcctctgctttatactatagttcaggttataaatggagttgctcaactaattattggaccacgttacctgctcctaagggtcaaatgtatccactggctcaaccatctctctcgtacaagcggtatattcattcccattgcatcattggtattggatatgttggaatataaaaccacaaatgatggtgaaaagcaagaacagaagcttgaagctgtctcaaccgtaaaggttcgaaatttagcattataaatgctctggagtagaaagttcttacatagtagactttcaatatacatcattcattggtaagctaatagattctttgttttgcagctgcctaagaattggttgaagtcccaaaacttccaagaacagtgtatcttttctgtgattgaactgcttgctgtccactttgctcaatggagcttccatatatcatttccagatcttgcaacgattcccgtcatgaggctgaagaaatttcacgagagaagcactatggaaggattgaagcgggtggtgaaacgctttatcgagcaggtaattcttattcccaagatgaaagcaaccaaaccaaccccatctactttttgtggagtattaagaatcttggcttgaatgactctcttgtattgatttgagaatggattttgatttgtaggtagagtcgaacattgagtttgttcagaggaagagagatgacgtgactttttctccaaacgatcaacaatctgcagacacgtttatgcagcttgaaaagcaaaatgcgaatgctccttatacacaatactatcaaagcatcatagacaaagctcttggaacaaacaagaagaagaagaagtgaggtaagtgtggaaaccaatatactattatgttgttatgcaatactaattttgttttctcagacatttgatgaatttttgtctttgtttttgcagcagtgattgcaccaaagcagattcccatggaacatctcaaatgtttgttcaccatttttgctgtcgtttatttattcttagtgttggctttcatgaattattttcgaaaagatctacaaatacattttatgcaaaactttggtgtaatgaaaaaaggagaaattttcgagaaaaacaaatgtttctatattcgatgttgtagtgttttagtaaaaagtagtagacgtgttattctgtctctcggaaagaatgttgggaaaactaagctttacttcttttaattccaaaatttagcggtttcataaatttaatgaatacagttcgatttaggatgtaactgatactatacaaaacactatcaactatttgacattttgtgatatagcaagcgagagttgcgtatttctattttaagttagactgatgtgaaagatttctaaatttcaaatgtacatgatattggattaatacataagaaaacagctttttaacaaaaacaatccaagggtctattgtggcgagacgttgttgtcacatcgattctaatattattgaacaacttaattattaagattttgttatgcttttggatatatttttacactgtagataagaattattatgataaaataaaattaatcgactccttttaaataacgcagtctctgacgagattcttcggcaaatttaaagcacggtgggtttcctatctcacgacgagataagattgatttcctatattttaactttgtgtgcaagactaccattcttcttcctattggctcctattttttgtttgatttttcttcttttcaaatcaccaaactgtacgtatgagcaaaatactataacaacaagaatcaataatatgtggttaatgagatcaaggaatcaaattaggaagagaagttggctatatatctttctgttggatcaattattatccaatgatattactaagccatggtgtcggtttatgttttcacacgaagagttttgatgtatttcacaaaacaatatctgtggtccaacgcagttagaggatcttattatcaaaacaaaatccataacaacacattcaagaagaaaatatgaaaaagaactctagcaaaagtggagatgaaacgtaactatatatggatcacaatgatttaagcaaacattggtgaaagaaaaaaatatggagaaaccaagtacgtttttactcgtacttttgaaaagttaaaaattcatacgaaaaacatacatactttaaagttaaaaaacattcgtctgctattagaaaaagatggtagtatgataattgaaataaaaaataaaagaaaaactacagtagacgtaataatatgtcatcttgtgatgtaatttattgattttgggaagaaatttaaagcagttgggtgaaggagttggagaggaggggaaaagaggtatacgaggagacagaggaagaggctgagagtgcccaaaagggtttgccaaatgaagaaagctaataagaatagactatatatgttcagagcaataattaactctatagttataactctcactttctctttcttttttcgtttcttcttgtaaattgtcagcgaaatttaagggctacgaagtaccctcttacaatcattaatttcgacaaccagtcgtttttatctctctctctccaagcatttagtgtgtcataagactcatgattcactttgtatttgtagagacgagcttagatagttagatcaatctcataaaccctctatcatttatatttctcggcaagtaccaaaattctacttgaaaatggacaaagccatttcccaaaagaaattgttttgttagggttatgtgtgttatcctaagctttttctttttgttgtcatcgcataatataggctcccatcactttagatttataaatataaaaaatactaagctactagggatatgtgggaataacacgtgtttttacaactaatacccttttttagtaagtgcgtctagtacatcgatcatggtttttgattgagaaaaaaacattagaaatcaattacgaatatatattaaacgttcaacattgttatgaactaatacgtttagcaatacttttacaaaaaaactttcaaaatatttgagactctagctagtgtttgtatctataccatagggtatgatatagttagtctttttctatatgcatttgtatatcattaatgaataatgaaaagggtttgtagaatatacgaaaagcttaacctttttttttttttttcgtctgaatttttccattagataatacgattgaaagatataaggtaagatgcgtttttggaatataaagccggcaagagataatctcttccagaaacaaagccggcggaaaacgagtaaatccccggaaactaagctcaaacaagggaagcataagatagaaacagaaacaagactaaaaataactccaaagataaagacttgccaacacaaagctcccttgaaccaaatgatcaaagccaaacactaaacacatctagcgaaacctcctatagtgaagcaatactacctttcacaaccaagtgaacctaagctactattccggcaagagagaatcaaggcaaagcaaatcaattcccctactactcccgaaaacggcgatatcgactcagcgacaatttaacgcctcgttagaagcctttgaaccgaccaaacctcgatcaggtcttaactgtagaaacaaggagcgaaacaaatcttcaaccggatgaaaccaatctcaaaagagagcagcacaagatcgaaccgggaagaaaccataaagaccaccactagaaccagggagcacgagtaaacaagtcgaacaaccaaatagagatcaagctagtcaccagaaccgttcaaataaccaaaacacatgaacacaaagaggaagcatgagagacgagggagggaccgaggtaccgagaacggagccgttgttgctcagatccagtgaaggaagaaggccagagcctcctccggtgctcccaatgcaatgaaacacgtgaccagagacaaaacgaagatccacaccatgaggcagaggcgagaacgacgactccatcttcaccatctaccttaaggcatgtcaatttcggtctcatagaaccaaacctcgatagatttgagattcgatacaacccaatccacctcgccgaaatcaccacgcttcacagccgaagaaagcaatgacaagaaataagagaggggaccgacgctggcgctttaggagccaccacgcgccggtcagatctagccaagacggtaagttgaagaagagcggcgattaggttttagagagtgaaagtcgaggaattagtgtgtattcacaaaaatcttaacctagtagtcatttcttgccaaaaaaaaggaataaaaaacaagaaagagctaaagcaacaacaaaatcatttgggattgttgttattcattagtgagccaactttgcattaggccaccaatatgctatagttacggatttatggtatagttatagaaaacaatacggaaatattggtggtgtacacataatgacatgaagagacggatgtgacaataaaaaattaaaaagaaataaaaaggtcccgtacgaggaggagtagtaggctctttggctccacttctcattgtatccgtaccatatggcatatgcagccacgtcaatgtcccatcttctctatcttcgtgtttcttctttcttttttttactctttctattcttcaacttggtacgttgcaactcgcactgatatttttataaaaatctctacaataatataaaattttcatttgtgggcaacactagggttttgtgccaataccaatcctcgtttctcacccatatttctctgacagtacacgagtttatggtatactaagcaatgatctggagttatgcaattgttaaagctatattcccatatttgtttgtgtatagctgaactattagacgagtccatatctcagggatcattatgtatgtatatttaatgaaaattaattagcctacagggctcaaccaactaattatctgacgtattatggtttaattcttttttgtcatcattagagaaattgaacctgcaggagaatcccttaaataccaaaacaccaaatataatgccactacataaggcaagttgtttgagctatcgctccatttagcgctaagttggcaaacaaaggaaagtgtccacaccaatttgtaaaaactaattgctaaatgtttttcctatgaccataatttacatagatattcaacatttgatcaatatttatatatatacatgaaaaattgtagagtgtaaatcacattgtttcaagtccgattaattaatacttaccaaaaaaaaaagtccgactaattaataaagattaaatttattgcatctatgtccctagtctttttaaataagtactaactttttgcaatacaattctcctaaatcagcaagttccaaaaaattgcgtaggcaggatcacaaatgagacgccgatataataggtctttggaagctttcagcacaacagtaagcctaatgacaagggatctcatacgatccgacgaaatcgattagtttttaaatgaagtcaaatatgcacattattttttatgtgttagagtgattctacaaaactgtttgattaattatagcaggagacatcagatgaagatattaaatagctgaggaactcactgaattattcagaaatttcaatttgcttgaactaacaggctttatatatgcgaaaaaatgtttcaggccttttaatttttattataggtatgatatgatatgacacaaattaaagttggtgactattgcataatttgtcgtctaacggatagccaagagagtagtcttttctttcttcatcaaatatgggatatatacaaattaaagctctcgaatatataattctgttaagtgttgtttatttggatattggcttaagataagttgtaggtaaaaagcgccattcgatgagaccaaatagcaaagatgatcactttttagaaaaacgaaaaaggaccaataaaacatgaaaatgtgaaaacccccaaaaagtttttcaaacactcaataattaaatatgaagaaaaaaaagaaaagagagagacagagaagcagaaacggtaagaggagggaccaaaagaaaggaaacgtctgaagaaaaccctaaaccctaaatggtgacgagtgatagagagagagatgaaggagctgtcaaatgtgtcaattccatcgatccacaaaacttaatgcttgtgggctacgcaacgcatctctctgctctcttcgttttttaacactcttgcttgctccattaatttactctatcttcaattcctttctctttttatccctcagatttgcctttttaattaattatggccacagtgagtgttaatgagctttggtatatttggtatcttcgattacgatgtgcaactgtttccctaatctctctccctctctctctctctctctaatattcaagaaaatctcaaccgttgatctctttctctttcttctatttaaacactttaccctttcctactttcttcaccctaaatctcttcctctccttcagatctctttagtctttactattagggttagcatgttgatgacttcagattctgaagttagtggcagtcattgtttgctattgcaacatcttcaagattcagaaatcagattctcttatgggttttcttttgagcctttattttttggtttgagaatcttgatgatgctgcagcggcaattaaatggcttacttatctagggtctttttttccattttcatcatgtggttaatcagaaatccagatcctcatatgtagaatcctccgatatgataacttgaggtgaaacttatttcacaggtatgcatatgattatatatatataagcacacatatatatataatagatttgtgtgtgtataaacatatttgtggacaaaacgatgatgaatgatttgaaaaacgaatatgtatatactactctcaattgattaagtgaacccttgcttatagatctttttttttttaaaaaaactttttgctgcacgatggatagatcctgaaaatttccaaaaaggttttagggttttctttctaacgacaaagtatataagacctgtttctgtagactcaaggtgattcataaatgcataaatttgatttatataataatgactgaaagggtttggaggaattggacatatgtatgaaggagcatgtatatgtctgttgttttatgttcggttacatctggttatgtctcttctctttgtccactggttaatcaaatgactcatcttcatgtgaaaccaaaccccttgtttttcgtgtccatgtttctttatgtatgtgattagatctctatatatgtttctctaatgtagtagatgatgatgtgatgtatgtgacaggtttgtataattcttataagagttctcgactttggatctatacatatatttcgaatttgattcctaaatcggatttgagaagaatctcatttctttttcttgttttttatttcttattgttttgtttagggtcttaaatctgaatctaaatgtagtagtgccaactcgaactatgatctacctgaatctgtatatgaaatcgaaattttacatatgagaaaggtttatatatgagaaagagattagtttgtgtacgttgcttgttgtgcagttgttctctgctgcaaagattcgctcatgtatttgtattaacatttaagatctactaagaatttttaataacatggataccattttattgatggaaaagtccacatctacgtaaaaacaaaactgtgtgtgggtaatcttgattttcaaagatttatacagatgagaattctaattaaatcaaacttgcttcctaattataaacgtttgatctcactgatgtgtgaatttctgatatgtggacttggataaaaattacaacaccaaaaggttttagtttgttttgtcgagcatatgcatgatgagttactccaaacatgaagcaagtgatgaaggtttgagtcatggatccttttttcaatattccaaacaaatgagtttatctacaaataatcatcaatggaatggttggctaagatgtaaaataatactagaaggtcaaaaacttggataaaaattaattcagactacccaaattatagttaggtttgaaaacgcgtttttatccgatatgggtctaacgtcaaaattggggcttaattactaaactaagcaattttgcaagattatcattagtacgagtttttgggccggttatgctgttaaagtttgggtggtctgtgaattcgtttattgtaatttaaagtgtgcgttttaagttgcaaacgtcgaccttagtgatatcgtaagatgtaaagactttcgttgtgaatggtggtatcattatttagacgttgttaaacttttctaaaggtaatgttacgcacatttggaatcttagggatttaatctggtgattggtcgtttaattttatgcttatcccaattaatagcattggacaattaaggcctttgtaaatttgggcctttaattttgggcctcaactatcggtgtatgcacatactactatttttcttaaccctcggtcctccactcctcctaagacacttttgctaatcaaaatagtttttgttgagttcactactttaatctacgaaaatctagtgacccaggggctaggttaaattggagactcgtacgatactcgtgagataattagtaatggttagcatctatgaagtatacagtaagagattcggattagtgacttagtgttattggtgattgtcatcctgatcacaatgattggaacaagatttggtgtttgactaatatggattttctatagatacgtctctgctttttatattcaatgcaactgttaagcgataatgacttctgaaaattacaagaatataaatcatcaatacgattacgaaattaatccgagtgtaccaatattcttatataagtcttagtttttttttggacctctgttttttcttgtccttatgttgtggagtgaatatgactgttgttggtggaataatgaatttgtactgagaaagcaaataaacagttacagttgcagagaaaaaggtcagtgagagtttagatttgctttgatgcctttaaaatctctctttttccgcttaagcttttcctattttctgacttctgtagtactgtacccgtttttttttttttttgtttctttggatttttaacttttcacatttgttttttgcatgtttagtttttttttggttaaattttttactacgtgagttattgaggttttcagcaataggtgcctctaaataatcccatatttttaaaaaacaagactatatttttggggaaataaagttagcgtttaatattcaaatgaaagctcattacttagtgttattttaattgttctttctagtcaaaccgtttttttgtttgttttgtgtgtgttcaaaaggatatttaactgttaaccattataaatgcggaagtaccccctacactcttttccttaactctctctttaactttgctgaatcccatattcgagaaaactctcaaatccatcagtctcctagcaagatcagaagtctaagaatcttcaggcaaatgtctcgactgagaaactcggcacagttgcagctatcgaaaaaggaaagtcttggagacaacggaggcgcgttgaacaccacgcgttcctctagacagaaacaggggaaatacggtttcacgaggaagtgtgggagattggtgaaagaacaaagagctcgcttttacatcatgaggagatgcgtcgttatgcttatttgctggactgatcataataataacaactctgaccactcctaaatcaacgtcaaaaccctatctttctcttctttttcttgcttctgttttgaactttattttaagagtagattagacacaaaatgtacataaatgattctacttctggttgtaatttagatttgaatgtttgtgtttgtgtttgcttttggtcatcactcatcagtttcagtgtatgcacttgaacatgtagaggatagaaagcaattagtataaaatggtgaattagattcgtttttcttattattgtcttacgccgatatgttcagatcacgagttatgacttaaatgtgtcaagactagagtaaagattattaaaatataatcaaaagggttcaaatctaaaaaaaatcaaatgtgattaggattttcgaacatcattgaagtcaatggacaattatggtaacttcgaaatgttctaaaagaataatgttgttatactatagtggattgaacatgcgaagtataaaagattatctttttaaagtaatacaattcaaagaatcttcttctttttagccagaaacaaagattagcttacataaatatgaagacacttattttatacaatggattatgctctggattacgtagtccaacattacatgaaatagctgcctcttaaatactacaagaagaaatattttaaacaagaacacatattcagatttataaaaccactacgtaatatttggtcccgcaatttccattgtaatcactatgaccagattaattattgttcttaataggctaatagctacaataaataaatgattaaataaacagagctggtgctagaacgatggagtttctttaagaaagaatgtcactactgctagagtcctccccatcgagctactgctgaagaagtgatgatattttatagaaaatatgtttctagatagttctcatcaacttatttgtttacatagaggtattttattgttttttttttcacttacaagtgcaaggcaactatcgcgttcaatgatattttccagtagcacaacaattttgggattcgcatttgggaggctagattgaaaagaatgattggtactttaaactatatgttttcgtcatccgattaagtgatttttggtttagcagtttctttagaagagaattatctagttcgagtccacctagaggacccggtattcttaaaaggaatatattaattaaagaatgatcccatgtctacaaaaattaggacttagatctgaatttctcgaacttttttaaaaaaacatgtgaataccttttacatttgtcatttatacatgatacaatcgaaaaaataaattatgtaggtgtatatttgagtgtgttggaatcttttctctttgttcctttgtactacattattcgtgtttttctaatcgtcgagtttctcgatgtagctattgttttacttttgatacttagctttgtggtgacattacgattaattagtaggttttcaaaaaatttaggttttttaacgtttgaccttcaatgatctctttttttttttttaattaagaatctttcaattattctggcaatgattatacagatgaattttgggtgttctatatatatatatgaccactatctcaacatatctgctcacatcagtttttgaattatgtacaactaccatcctaaattatatttttgttattcatgtatatagcacaccacatacaagtttgggactaatcaagtttgacaagaagggtttaaatattcaagtcatgtcgttatttatagtctacaaattttatggattatacctacacctctctatgaagaaattggctgcctttaaacatatagagattcaaatgggtccgatttaattttcctattaaaattttcaatatatggtggatgtttgatcattgcgacggtgaataacacttttttcctaaattgtgtatacttaagaaaagagtaatggcggcattgaacaattataaaaaagatagtatataataagtatatttcaattccactatgtataaagagacaaattaaaatagtttagtcactgattggaaaactagactttatgagccatcccccacaaatcggaagggatctatgataaatgattataaaaaaaaattgattgttcattagcatgcttgattttgatttgtttatcagctctctcttcttagacaacaacacgccgacgatattccgttttgactttcactgttaaattgcactttggggactcttttgtactttaagttcactcctaattattggagattacaaatttacaacttataattttttaaaaagtgacaactgacgtgagatttgtttagtcttaagacaaaaataaataaataagagaacgagcagcatattggccaatagaaatataatgggcctaatgggctaacttctgttgttgctcttcagttaaatagataagacctcttgaaaacatgatgggcctaatgggctacaaatatgaattttagcaccggtccctagagaacaataacacgtgacgtcaaaagcatcggattagagaaagaagaagaagaagaagaagccgattctaggaaaaatccgatactctttggacagtctatggccaccgatctctacggcgatctctttccggttatcacttcgtcactacacatttgcttcttccgttttcgtatcggatcgaatactattcatctttcttcgaatcgggtgagttcgagaatctaaagcttacacctttagttacgattcgtctgctgtttgattttgaattcatatatttgtttatctgcagaactatccattcactcaatttataagattttactgattttgtgttggtgagctgagataatgataaactcactcagaaatgattctacactttagttgatgtaattgtgtatgtgtttatgagtactgaaacgtatctgtttatattccagttatccagtaattgttattttatatgaaaaggtttgttttttatgtgaattaggtttctttgaacctttgaagctatgggtgatgcaatcgatttgagtggagatggtggcgtcttgaaaaagattgtaaggagtgccaaacctgatgctatttcaccctctgatgatcttcctgttgtcgatggtatgttcttaagattgactagtgatcagggtcaatatattgttcatctactgcttatgctactcctaattatatgtgttgatgaaggaccataaccttgtttgattttaacttagttcattatgagggtatcttggctgaagacgaaaaggttttcgacactactcgcgaagacaatcttgttttctcctttgagttaggaacaggcagtgttatccgttcttgggacattgctcttaaaaccatgaaggtttctacaattttgagtctttcttctatccttataatctgaacgcttcagttattatatacaactgatttgattttttttacaggttggagaagttgcaaaaattacatgtaagccagaatatgcttacggaagagccgggtctcctcccgacatcccacctgagtatgttatgttccaaacttcttgcatctcgttcaagggagtgtgacagttttttttttgtttttgtaattgagatttttggtaattgcagtgcaactttgattttcgaggtggaattggttgcttgtagaccgaggaaaggtgctagtgttggaagtgtttctgaagagagagccaggctagagtaagtattataaataccatttggacctaacttttgacttgttatcatgtgtgtaaatatgaaaacttttttgcttcatggttgcagagatctgaagaagcagagagagattgctgcagctgcgaaagaggatgataagaaaaagagagaagaagcaaaagctgctgcagctgctaggattcaagctaagctagacgctaagaaaggtccaggcaaaggaaaaggcaaaggcaaagctaaataagtcgaatgcaaaagacctgtcactactatttcatgatgaatctaaatcaaacttttggaaagggagagtcatcagttacatcatattgagttattgaccattacatgatttgtttggggtttaattcgcacgcacattaataacataaacaagtgttcgaaaccaaacttttcaaaccatgtcggaagcatcatcatcaatctcatcttgttcttgccatcctgaatgagctctaaatttacagacaggacatgttccttgctgtctcaaccatggatcgatacatcctgcatgaaactgagcaaacggatatatgtctgagtcgtgacacagtaaagagctggaagattttcagtttaagataaaagtaaaaatggaaacctgatgcaaacaaggtaaggtgcgaacgatttcccctacggtaacttgttctaggcaaacactacatgtgagctcatcttctgttccttttttactttcattggcagaatctagcatcttctgctttgaataagaggaaaacgacatgaaaaattaagacattgttagccacttagcaagaactttttaccgagcatatgagtattgaccagttcaaatgtgatttttgtatatcggctattttttgtgtgtggggtggggggaaatgtaaatatgtcatatacctcagctgaggatgaggttgacgcttgctttgccaaagagcaaccactgtcaacaaaagcgaacgcaagacaaaaaccatgaatacagattcattcacaataattagaaagaaaacaaaaaggcgttgagctatgaaaactgagaaaagtttcactcagtaacaaattttaaatgttcattccacaataaaactagcgcctgacgattaaccaaagaagtgatgggatcaacggaactcatgattttagaagattctattgaaaaacaaatctttagtaactcaatggacaatcaataccttacatgttccgtttagcaaagcaaacaataaacctaagtacaatatcagtttctaacttattaagttgtatattctaccaccccaccttcccctgttaaggaagttaaggtctatacaagttgctatatcacatcatcctaacttactattttcttaattcctcaatgtttccacatttgaaagcattttaaactgttaaaagagaaacaaggtacaatattgactcacttttcaggatccaacaccttgtacttgtgaactggaagtgcatttatctcttcctcgctcatagaagttgtggaaacattatcagaatcaagtgctcttaaagtttcataatctgttgcagcagaacaacttttgtctcagacttcaaccatagaaagcaaactactaaactatagactaataaaaaggaacaagcggatgatactgacctaagtcatcaaattcccgatcaagaagagccagctggagcctaagtccctgaagacgccctctcgtagcaagagcaatggaaggaggcacatgcaacctcagctcagtatggctaaagaggccacttgctgctgcagcctgagcctgagcatgagcttgaagttgttggcaagtagcatacatcctaagcgtcgttgccatcaaaaacaccccaagcacaagccacagctacaaaattaatggaaatgtcaaactcacacccgaaagacgactaactcaaaaggaaaaaactttaactcacgtatttaatcataccaggaaattaggaggcatctgatgcgaattgagaatcataaacagcaaaagaactgaaatacacaaaccaaacacaagtattaacaacatcacaactgaagataacatagaaggtgaaagtttgaatttacctgtaaccagaaaagcgagggaattagaattaactggtcgagctccatgaacacgctgataccaaaagacacttgcaataagtatcattctaacaaaaaccattgtatatgttttcaagaaagcataccatagctcgtctttcgggtagaaaaccacccgagaatccgctttctaaatctcctctacttccccggaaaacaaagctcatgtcttccaaattcacaagagagcctgcaaaagaaaacaattgccactgaatctatatttggttctatcaaattaattcaaaactctataaactagaattcgagaaaccatgttgatcacagcaataaaggagaggcatttaaaccctatgctgatccaaacaaaacaataacacgaatcttttcacataagccaagagattgaaaatgagaaggtttcattcatggatcaaaaaaattgaacggagctagagatcggaggagaaattcacctgaaagtaggagaaatctctacggagaagagtcggatttactcacttaacataggcgtggtgacgacggagtcacgaaaatcgcttgtcggaccgagtcgactcggaccgagttatcgctaacctgaggatatagtttttgtcttcattaacacagaccattaacttcatatggtttaactgttgctgacgcactagcttaaaaacgtcgtcgttttgatgttgccacttattactttctctcctactctcatgactttatgttatgatgcaataatttcaccacaagaatctgacttaacgttggatatgtttcaaatcgaaattagataaatatggaaaattcacaaattaaccatccaaattagataaaagggacttctccttttatttttattttataaagatttatagtaattcctatccgtatattatttaatttaataatgtattaaagatatatatatatatataatttttttttttttttttataaagatattactatatcccataatgaaaaaccaatatataaagaagttcaatggaacgtaggtttccaaaatccaaaccgtctcacaagtcacaacttccgcctctttcctctctctctctctcttccggtgattcctttagcctatagatcagcggttgatctcaacagagagataagtttgtttttaagagattttgatatctagctagggtttactttggatatttcttcgtctcccctagggcataattactggtgcagatatggattccatgatcaaagatgttgatccttccgtattgttagccaatggctttattcaatcccacttcacgaacttaaatacttccgaagcattagccaattgctttctccaatcttacttcctgaatctaggagtctatcccgaggtagttcagatgatgtggtatgccgacgacagtgttatgactagacccggtcctgatggtacaatgatgtcttttacatcgcctgaggtattgtcattaatcagatcaaatctttctcatgagtttctgtttttagtttgatgttctggttgggagtaattatattttataacaataattcttttagttatatttttaacgttttcaaaacgtataaacttgaaaaaagctgtaaacgatttataaggacaaacaattttttgatggtgcaggcaattcaggagcaaatcgtttcatgcgactatgaaggtgcttcgtttgatgtgatgagttttgctgctcagagttgcaataccagttctgaagatggagcatttatcatggttactggtttcttgacttgtaaagacaaacaagtgaggaggagatttgttcaatctttgtatttagctcgtcgtcaagataggtcttatgccattgtcaatgatttcctccgctatatcgattcaataccagcattaccttctgttcctgaatccggtaaacagctgtataaattgtgtttgatattcaattttagaatagtaagtgtttagcttcatgagattacaaaacttactaacttagttttggtgtgactatatatataagcagattttgcagctggatttgtcaaggtttactacgagttgcctatgcgtgaggaacttggtttgatgtatgtcaatgaaagtattatgagcagaccgacttcgacttctggtagaacaatggtcgagatgcctggcctcgatgtaagttgcaaaagttcctaattccaatgtatttctagagaaattttagtggaataaatctaaggggttagttttttggtgcaggcaatcaacaagagggtctcaaatgagcataagagggcttctaattttatattgaatagtgtggattatcagatcagcagatcctttaaagatagaatgtttatcatggtttgcggtttcgtgactctagacgacaaaacagagagaaagttcttgcaatttttctatgtgacacgttgtcacaatgggtcttatgtcatctacaatgacatcctccgttatgttgatgttacccctcgagacacacttgaaagctcgagccagtccgctgcaaaacctagtactgatgtcgagcttccttacttcatggttaagaaggggaagctactctcttattttaacaacatagacacgcaaaattacccccactaatagtttatgctagtgttgttctttttttaaatgcatttaattttgttcctttatgtcctttttttatatacaaaaccttattcgtctatgttctttttatttgagctttataaatttctttttttctcatagaagaatccttgttctctgttccgagatatttgttctatgagactatgactgaaaaatgatttatctctatttcgtgttgtaatcttgaacttatgcaatgaattgttcaaaatcaggttacgctaaccacaagatttgagaccaacgatcaactcaaaatattaagcaacagcatatgataaaaatattttacattttaacattcagattacttgttttcatggtgaaatattatgcttgaaacgttactaaaacatggttaaaagaaccaattatcttggatcagttcttgttttaccggagaaggaaaatatcgacgaagtagtagtttcattcggtccgctataaaacctagctgaatccacaaaatcttcaaactcgcctgcactaccgctgcgctcatcaagacacatactatcatttgcatctagaaaatccggtgcaggaacaacttcaggcgacggaaactgcttttcgagatacataactacttgtctcattgtaggtcgaacctcgggtgaattatttgagcatagaagccctaatttgatcaccataaccacttcctcttcgtcaaactcaccgttcaatctcctgtccacaacatctctaatgtctccgctttgccaccttgaccaaacccaatcaaccattacaagctcctctggtaacgcacttgtttcgataggtcttcttccgcaagctacttccaataaaaccgctccaaacgcataaacatcggtgcttgttgtcagttttccggattttgtgagttctggtgctaagtacccaaatgtgccaaccactcttgtagcccccggatccgatccatgctcatataacttagcaagaccgaaatctcctacccgtccgttcatttcgctgtccaacaaaacgtttgcagctttaatatcgcggtgaataaccgtttgttcccatccttcgtgtaggtagagtaaaccggaagcaaccccttttatgattttgaatctttgcttccaagtcaagataacttcagggttttcgtcgaacaagtacatgtctaagcttccattaggcatgaaatcatagacaagaagcaaatcatcccgccttcgacaccaaccgagcaactgaacaagattcctatgccggaggtgaccaatgcttgagacctcagacataaattctcgtacaccttgtcttgactcatgagagattctcttgacggctacaaattcgtctgaacccgggagctttcctttgtatactttaccaaacccgccagacccgagaagctctttgtccccaaaaccattagtagctttcttgagctctctgtaagaaaatctatgcggaccaaaatcaagctcccattcttcaactctgtcttcatctttcacctttcttaccacgaacaacgatgcagcgacaagaaccgcgaagatcaaaagggaacacaagagagatactccaagaatcaaactctgtctcttcttcttcctcttcttgattgaactaggaatccgaggaagagatggcaaagacagagaaaatgcttctccactcatgttaaagttccaacctaagatgtaatgtgaactagctagcaaaccggtggaagcagagaatccaacatacatttcatctcccaaaacagaggataggtcaacatcgtaagagagaagagacaactttggtttctctgagaatggagaaagtttaacatctaaccttttcttgtttgaatcgtaatcaatccaagcttgaatcactctaccaccatcaaggaaaagctcctttttggttgagttagcgaggaaatagccagcaggagtcgaaatactcgattccatactgtttatatcgattcctacatggttatcattaatgtcctcaaactccaaatccctgacagtatcgaattccacagcgaagaagtggctagagaagttaactctgcttgaattcaacaggcctaagtactggctaggaagagaacctctgagatctggagttggagtgatggcgaaggcaagtccgtggccaccaagagtaacaaactctggaaccatggcgattgcaaaagacgtggagaaagacagagctcggtttacaccgattggcttgaaccgtattggtaaggagtagaaagcgtgaccaatcacgcgctgtgtctctgttgtgagcctgattgctccagtgggggcgatctctgcaactccgtttaacgttaaatttggtgaggcttttttgaagccaatgaaggagaagtcttgaattagagatgaaactaagtgtgttaagaagatgagtagtaacaagatgacagcaaaggtttgagacatcaagaattgttttcttgggagagaagtaaaaagagtaagggctacttaggtactagggttatagttctaatatatgatctatttggaggataggtcaagaagatggtgaggatacgaaagcatgtgatactgtttataatgttggtgatacaggaacatgttattatttctagactgatgatactttatgatatctaatatttaaacagagaattcaaatctaccattaaactacgattatacgaggttagtacgtaccataattataggttctgggtgttgttaatatcaattgagatcgtcggtattgattagtttaatagataagaaagtacgtataactgtataagtagtaatcaaacgatctaccagtttccacttataattcttttttttcttccgacggatacaactgtattactagaggttatcgggggttgatcatgtttcataatttaatttttcttaacggtataaatgataattttcgcactaaaatttgttaactaaatcaaaactccaaataatctatcttcttttacatctttggattgataagatccgatcgatattcaatcttatggtgactatatttgttttttaaaaatatatttgttttcaataaaaataaattaccctacacaggttaaaatctagttagtgttgtaaatacataattttgttgggtaactccaaaagcattacagtctggacacaattttagtaatgtggttcagcaccaatgacgatatcttggaataagtactatactaaaaccaataactttatatattttcaccattcgataaatattcatcaattagatatgctaagtagctaaagtatcgtcatgactcaagtttttatacagatgtagtattgattgtgtaaatgatccacttgacattgaaaattattggattggaacaaattatcattcagaaacgataagtaagaagaatattcttggataggaagaaaaagtcaattaatcaatcaactaagacactggaaaaacaaaaaagaaatgagataagtctatgttttggattgatgattgacggccaaactaaggataaaagtccttcgagaaaaagggttgttggaaaaaatggttaaaagataataaaagctgaagaaaatggattacgatttccgttgattgtggttgatattgaaatgtaaatagtaggatgatgaaataacgaatattatatactaggaacatgcttaagtaaaaaatttagtgaataatcacaaaattcgaaacttttctatatttcataactcttcattaagcacatagtggagaattatgtcggtcgaaattggctcagtaaactcctcattgtgccggccaacttagaagctgaatccgtaccaaaagatctaaacctaatttaaccacattattttataatcaaacaaaataaatcaatctgaaccaagaaattagatatcctctcctattagcaactcgagcactcggttttgaatattttgtatacaagaagtacagatatatagttacacttaaaccttaaatccgaattagttcttagttttcatatcaataagacaataaccactattccactaataacgaaaatgtaccagagaaatacaaattcagatgagcgaaattttctaaatttactgttttgagttcaaaacaattaaattcgaaaccgggacaaggacaacaatttttcacaaatatcaccttattatgtcacaaaagtagcggtgaacagaaaaacaaatttgtacttagccgttgacatacaaaattgctacggagtttagtcatcatgggaccatatattccgtactcatgtttttttgatataccataaaagggatatttaagaccagagacaatgccaaagatccaaacattttgggaaaaacacagttttgataaatcatgctttttgggaccaaagaaatcaactttgttgaaattcctcagctaacaaacaatgctcactagaagagtaaaacaacaaacacatgtcaatgagaaagcttctctacaagtctcttttaagcacataaaacctcatcaacattaatcctccacaaagctaaaatccggttttgtattgctctattcttatgtcataaggactaagattcaaaatgcagcataaataaactttctattagcaaaatataaagtttcgctacaagtctctaagtacataaacgataaacaacattattcgcccgcaaagctagaatccagtgttgtactctaatcttatgtcaaaagcactaaagattcaaaatgcagaatatttaaactatcttcctgcatatctccttaatgcatacaagctcaagaagaacaaagtaatagagccaaatacaaaaagctaatctaatctaatcagcctcaacaagtaagagtatgaagactgaagagtaaagatctaagaaaggtatcaaacaattaaaagacacagattaacaaacagcagaatatcgaaaagaatcacacttacttaccgacattaagaaaggaatgatagtcgtaattgcttccattgcaaaggccacacaccattgcttggttttttccaacatcaaaattcaaaagacgattctacaatcaattcactttcatacaaagctatccgcgatcaaaatagtcaagtcagaaaagccgccacaaaacaaacaaacaaacactagctaattgtcatccgaattatccgtaaaaaaaaaagaaacttgatagctttaataaacaaaagcctaaccatcctaatggaaaatataatcattccagtaaaaagaacgcaccaaccaccgcctatctaactaatcaatacgaaggaggagcacgaggcggaggaccaccccaatacacgtcgtgttgagccatttgatgaccatttgggataaaattaggaggcatattatacatcggcggctgcatcgatccttcgtttccgttattcccactctcgttatcatcattctcttctttctgcttcttcccatcttctagttgaagcggctgctcttgctgttgttcttcctcaatcggtaacctctcataagtggcattgcaaaacgtagcagctatcacaataacgggtccagaggcaataagcgggccagcaactccacctcccacaacttgaccttgagctccagctaagtaaatggttaaaccagcggctgcagcaggagagccagacgtaggaagaaaagccccacacatagacaagatctcaaactgaccacgtaaactaacaactccaccggatgcagcaggctgacgcagagtaacattagtaaccaaaccactaccgctcagcaccgaaacgccccggccgcgtctacgagcaaaggcgtttaagctttccgccacgtcagctcccgtagcaatctcaagaacatggctctggagagagttagggctttctttggtaacaacaactggactctttggtttgttcttggaaccaggaggtctacctctaggacgacgacccgtagacccggatccggatccgggttcaacagctggttgctcgtctctgctgttctgttcttcttggctctgagtctgggtattagggcttccactgttgttggtggtgaagtcatggtccaatcttggatccgaacgagtcatagtcggtgggttgttgttgttactgtttctgtggtgcaaagaaggagctgatgacgtcactggactctcaactccaccgatcgcaacattccctacccaccaaggattcgccattctttttttcttctctaatggaaataaaacgagaaagagaatctttttctttttcttgttttttttgttgaagttggtgttgatggctctccgacaagaaactattacaagacaggaagagaatccgaaaaccttatcttaaacttttagattaaccaaatccaaaccaacatgttgcatgaagcagacacacaagacatgggggtatcatttgtttgctatcatcatacctgagagagaggaaaaaaaaagaatcagatctacaagaagaacaagaaaacgcacaaaataaattttccttaaagcaatattccccaaaaagctaagatcaaataaggaaaaaaaaccaaataaaatcctccaaaaaaagatacaaaaatcttcccattcgaatataaaaaacttacctttatcataaaaggaacttctttgtctgttttttttttttggcttgctactgaaaaaaggttaaaatcaaaagaagtagaagacagagagagaaagatagacccaacagggttttttttttttggcaggggaggaggattttgtactttgaaagtcatgaagtctttttattattaccgtctctttctatattgtactttggaaaatattgagagcatgcgtacgttaaaaaggactgaaggaaaagaggcgtacgataagggggttgtgatttgatctttcgtgattgaagttctctgaagcggtcctctcttctctctctctctcgaccagagccgtccttttggaccattgaacttttaggtgttcgtgcaaaagtttttgagcgagcttctctagacgcctgtctcttcttccttctctctcactacccctggattgctcacttttgtggacccgtttaaaattactataatacccccaatacctcaattgtcaatttcttggttctggacttctggtattgcaacaagttgtcttttgttttggtttaataatggtgagaaatcaaacgaaaacacaacttgagacaaagacttctaatactataagtttaagctataaacattgtcaactcacactaaattagttgctctttttttttgtcaaagctaaattagtcgtttaattttcgagtttcatcagttataagtttagaactagattaacatgttaaaaacagacaataaaaaaaagatgctgtaacgtttgaaaataatggttactgaaaacgtacatttattgtaagatccaaataagggctgttattttttgaaaattcattaacccatatatgttttggattatatgcaaagagagtggtgtgacatttgactatctgttatgaatgctaaagggataaacccattaccagaaagaaagaaaaaaattgctaaagaatttagagacattgaattcgatgacgacaatttgatgacaaaaacttcacatatataccctatcttgaaatttgatttcccgcttgagaaattggaattttaattccttgtatattttgtttgactatatcaaatactaaaaataatactaataaattaggtttgatgtcaaaaagaaaataatatactactaaaaataatgaatttggttcacttctttaatgaagtgaataaaaaagaaggacaccaccggccccaatggccactagaacggaacgttacattataccatatatttatgtctttttgtcgccttttaaattcatctatttattaatatacctacctctatatctctctcatttatgtatcttctttctcacccaatctagataaaatgccatttaaacacctagcaagaaatccaaacataaatgttcgatttgttaaatccaaacaaataattcatagcacatttcaaaggtagttttatagcaaatgttattccataagaatatgaacaactactatatttgtttatatattagggtacaagtaaagtaattattatttttctcataaagattcttaagtattacatttgaaatgtgctatgaaaagaaaacacgtggaaatcgttggtgttaatagtttgcagatataatatatgcaaggtaaaaaacataaatcaaacaaataaggccacatgagttatatatggactgaagttgatgattgtagttgtagatcagttttatatgagttataaattatattttgttattttatcgtcaacttctttcacaatactgaaaaagttgcaagaagataactcatatcatacataaaatattcatacataatgttttacactaattcaattattattatttggtacactaatatagttcaattattgtttggagcagatttggggttgtgaccaaatttctttactcaggtattcttctatttaatgttttaagggaaatatatgcttatttgattaaatgcctaccaaaaaaaaaaatctctattaattatatgtctatcaaaaaaaatctctattgattaaatacacatgcactcattatctttataaattggcttcttcttccccctcgtaacataatatagagtcatagacagatacaattattaacacaaaaaagaaatggcaaagacaaacttgcttctagctgcaactttacttctgtgcttcatcgttattacttcctttgctccggccagatccgaatctttactcacaggtattaactcaattagatcgattttcacatctatctttttttatttatatataaaaacattgaacacacacgtaagtcttcaaaacaatatttcaaagactaatgatgaacattaaaactaaaacataacaaagatatatatatatatgtgcatgccgcttcccgtagattagttagtacttagtatagaattacactaattctattatgatttttgttgtataaaagggattggaagtgaaggggaaatgtggcacagaggagtgtatgctaaaaggttcgttgtttgctcatgtggattacactagtcccggtgacagaccgccaaagagttggggaagaccaccccatgcgccccaaatctaaaataattgaaattttcaatttgcttatgatgatcttatactgtgatatgttacttattataaaccgacttcattaataaaaatcacaattttattttattttggaccaaaaactatttacatataacaagttaacaacaataaacaacgtacatcatgatttcttggattatctgttaagtttgcgattgaaaccctttagtggtacgtagtcaaatgctagaaactcatttctaataaataatgttagaatcaaattagaaggtacctattatctaagtaattaatgatgtgtccaaaataaaagtagtgttgattaaactaaaaaactcgagatcttaagatgagtcatcgattcatggatcatatcacttgataaaatgaattataattgggttgtataattgcttgtgagttataaactgaaggttgatgatttatagataagttttatactatgaatttaattacaagaaagataagcctattaaaaatagtacaaactcgtgatatggtttgatgtactctcacagattaaaaaaacagacaaaggatgctaaaattggagaaatcactgtctataagatacacatatatattacggtttcaatcttaaataaattaaaatccaaaacgtaaatgaagaactacctaaaaagcctgtgttgttcaagaattgagaaagctaaaaaggagtatcagctttgtttcgtaaagaaatgcttttaacttttcttaattcactaggatataaacgcgtaggtctatttttgcaacttttaataaaattttgtaaatcattgatgggtttggttagagtatgtgctgcttcttgggccctgaaaacccaaaatactttttgttcccatttttaataaaattgcagaaaaaacttggaacagatgagggagaaaaaagcttgaactggtgacactgaagacaattagaccaagaacaaatcgtcctagtgaatcattaagagaattagtctgaaagtttgatatattattatagtcgaaaatcctaaaaattctgaaactcctagtttagactcttaagaccagccttgcggttctgttgtcaccctcaagtagtttctgttctggtttgttcaagagcgatattctaatgaagatatataagactttgaaattgttttcacaaggcgataaattaccacttaacttccttgacccttgttattaactgcttccaaacattgctctacgagactcttgatttacatgtttattacatcatattggtaagcataacatagaccaatttggttatcgccaacacctaagcttagtagtagtaaaaaccttatgcatgagctgattttgtatctttcttcagtttggagttgatggacttttcttgataaagctttggattacgagttgaaatccagagaaaagctccaatagcaaagtcacgcttatgagccaagtcaccataagtagacaaaccgtaatctgctaaaaccctgtcgagcttccactctggcatgtcttggtaatcttctttggagtatcttgggtaatgaagaggcatgcgaaacacactcccttcaccgttcttgccattttcaacatccatatatactgtacaatattattatttgaagaatactctttcctgttctgttcttgcttctggtgtgtaaatatgcatgtgtttatatatgttcttgaggcttatttatataaaggtgttgcaagcggtggtttaactacacacttaacgtgtgagtttttgtcacacggatccgtttgtttaccttcttcattgcctttgttaaacgcatgaacatgtgtaaatggaaacattgttgtgatcataactttggataacactaatcattcacacgtacggatggagtttaaaatgtaaacaaaacttcgattcacatacgttctaaatttattaagaatacagattactgtaaacttatatgcctaaatctatggttttaacttttaagtatatcatgattcatgaggtgttgtactgttgtttttcttcattagcatgaattgaaatttaggtagttcttcatacaaaaagttaaagcaaaattatttttaaaaatttttgtgaatgtgtcatcatactaaatactatgaatttttgtgtttccgtttatgggtatgatttttcttagttaatattacgaaaatatacaaaatcttgaaataaaaatgtaaaacctaattggtttaaagtaaaattttgttaggtttgtattaaagtgtgtacactgtgttgtagggttaatttacagttctcatctacaaataacattctaaagaataaaatcacccataaacccaaacacattgttcttggctaattgcatatgttgttcttcacaaaaagaaaaaaacttaagaaaaaaataagacaaagcagtgatggctaggatcaggttcttgagaggtcccacatggtgactcaaagcctgcgacgtgtcatcacaatcattaaacgaaccccactggctaatttagccgacatatgaaggaccaaaaccacacttctacttccagaaacttcgtcacaaactcttggcttagatttcgtcataaacttagtggttcacattttgccacctgtctgtttagtccccacgtgatttatcctacgtggctactctcgttcctaaataatgatacttttttgttggaaccaaccccaaacttattgatactttcgtaactcgcccctattctttgatccaagtataaactcctttgtcattccttatcaatcattcgtcaatagaattaaggtcgtgtcttaacacactttctaaagggaaagcctatttctggaaatatatttttagataacgttttaacaaaaatggatttgatcaagtgaaaactttggtccacatactccactgagatatttacttggcttacaacatatgtcacaagatatatattccaaagagatattttacttggctcacataattcccaagatatttcatatgttttggttttgttttcgatgaagataagatatttcaaatgcttctccacctaaacccaacaacttttgagaattccaaattctgatcaagatagaaattttttatattgtttttcgaattaattgtttttcatatcactacaaaacaaaaatattatattaattaaagtataaaaaatggtactaatttaaattactcaaaataaatgatacacatatacatggtgttatatcaattacaataattgacactattattgaattgtttgacattgatttaataaaatcggtacaaattcacattaatttgcatctttttcaaaatattattacaacaacatttaaatcactatgttcttaatcgtcttttcgtaataataattaaattttgaggtttttcgtttttttagataagaaaaaaataatgtaaaaaaaattgacgagatcatattttggttgatcacaagtgaggaaaatgaagttattatgtaaagaaggattctataatcgattgaccaacattcctccaaagaaatatattttattttataaaaaaatctaataaataattggaaataaaatcatcattcaccaaactttatactgttttacaaatctacgttttagtcaatttcttccccatacttgacctcatgaagcaatgaacacaaatctatgtttcgattttaccatggaagagggtcttagtgatatgaatttaaatgtcgggataaaatataagattataaaactataaaggtttattttgaaatacagcacacacaagaaaaaaggcccatcaacctcgcagtcctaattagataaatacacgtcaacttctctgggaacaaaaaaactgatattttctgattcgtcgtttcctttctactttcttcttcgtcaggttttcaaaactgagaaaaatgaatggcgagggaaaattggagactggtggaactagcgccgccgccacaccaaaagaggagaaggaagaagaagaagtagtttcccagagagtagtgtacatgtggggttacttacccggagcttcaccgcaacggtctcctctgatgtcaccagtcgaagtaaagattcctccggcagtcgaaagttcatggaaagatgtctctggtggtggatgcggtttcgcaatggctactgcaggtgatagaatgttttcaattgaaaagttcttcacatttcgaatcaatttcataaaatgttatctgatttgaaatcatgagtaattttttgaagttgaatgatatggtttttgttaaaacagagtcagggaagctaattacatggggttctacagatgatctaggtcaaagctacgtcacatctgggaaacacggggttagattttcttaacttaagtgtgaaattttgattttcttttctttgtgaaatttgagttttagttagtttcgattttattggtttataggagactccagagccatttcctcttcctccagaggtttgtgtacagaaagctgaagctggatgggctcattgtgtggcagtaacaggtaacattttcatgagcttacagagacatttgtgtccaagttcatagctttaattgtcttattgaatacagagaatcaacaagtttatacatggggatggagggaatgtatacccactgggagagtcttcggacaagtagatggagattcttgtgaaagaaacatatcgttctcgacagagcaaggtcaaattttctttgattctttcttgtaaatctatcttcttttttaacattgaggatgaatgtgaaggatggtgactctttttgcagtgagttctagttctcaagggaaaaaatctagtggtggaacgtcttctcaagttgaaggtagaggtggaggggagccaacaaagaaaaggaggatttcaccgtcaaagcaagctgctgaaaattcatcacagtctgacaacattgacctctcggcattgccttgccttgtatcgttggccccaggagttaggattgttagtgttgctgctggtggtcgtcatactctagcattatcaggtgagatttttagcttttcacacaccatgtcactaatgaggtacattggttatcaattatgaaaaaaatatcagtggcggtatccattaagctaaagagcttttggtgtgctataataatcacttgatgcatcctaattttttttctgaagtccagatattggacaggtgtggggttggggttatggaggagaaggacagcttggattgggctctcgtgtacgtctagtctcctctcctcatcctattccatgcattgagccttcttcttatggaaaagccaccagttctggtgtaaacatgagttcagtagtgcaatgcggccgagttcttggaagttatgtaaaaaaaattgcatgtggagggcgacacagtgctgtgattacaggtattgttctcaccatattgcttttgtggttagtcatttattttatgattgtttaaatccaaatcactgaaaccaacgcatttcaaccttagataaatctttatactctgtcatcaggatttaggattttgaaatatgatctcatttccgcactatgccttggttaaggttcacttgttagccttctcggggtcctttatataactatgaacagaccccaataattctcgaccctttaacctggaaaagattgacaatttgacatatcttatctgaggatttatcacaagaacaatacttgctttgcatataatacgaatgagtttttttgtggacagatactggagcgctccttacatttggttgggggctttatggacaggtgagcacgatcgatccctggctttatttattacagtatatgcttgaaacttgaatgagttaagattcttgcttccagctgaacacacatgttgaggaaagctaatcatcatagtgttgaactaattctcaaaatgtttttttatatataccaaaacatagattcaacacaggattcaggtttgataaaacatagaattagggaaaaatgctagtctgcatttaaaataagactggaaaagataattgaaactttcatttgttatacatccgcagctaatattttcactttctgttgggtatgtggaagtaattgattttttttatttttgttgctctgtgaagtgtggccaaggaagtacagatgatgaactaagtcctacatgtgtgtcgtctttgttgggaatccgaatagaagaagtggctgcaggtctatggcacacgacctgcgcttcatcggatggtgatgtttatgcgtttggtggaaaccaatttggccagttaggtactggttgtgatcaagctgaggtaaaaaatcttgaactatattgtttccctggctattctagtaaatgctaatctgattatttctagaggccctgccactaaacttgaagtcatttgatctttcagactcttccaaaactattggaggctccaaatttggaaaacgtaaacgtcaaaaccatctcctgcggggctcgccacacagctgtaatcacaggtaacccatttaaccaaagactagattcagtttcatgttagctaggaaagtgattcatcttaaaacttaaaaaaactgctctgtgtttttgtttgttgtagatgaagggagagtattctgctggggatggaacaaatacggacaggtaaaaagagaaagaccatatggagtttctgaattgttattgtcgttccattgaatgacgtagtttgtgtcttgtctgaaacagttgggtataggagatgtgattgacaggaatgcacctgcagaggttagaatcaaagattgcttccccaaaaacattgcatgcggttggtggcatactctgcttctaggccaaccaactctatgaacacatccgaatttttgttagggtttaattagagcaaatgccagatttttcattctttttttttgttcttttgtcaagctttgacctttttctacatacacgtagacctttagtatcgcattgtacatacacaagtcagttttcatttgttaattgtatgagaaaatgaatgtttagcttttattcatccaacttagtattatgcatgaagtatgaacatactatcctatctccataaaagaaatatgtaaatatacgataacgagttaacttattaaaaaaacattaaccaaacatactatcctaacttaaaaataagaataaaagatgagacttgtatttgtatataagcataagtagtataaagttaacccaacatttccggctacaaataaaagtataaaacataaccattcaccaaatgaaattccttggagaaaaacaaggctccatgggccatgtatactcttcttcttcttcttagtcgtcctctagatgctcatacgttcttcatcaacttcttcttcttcactttattatcctcttatatgtgtgtcatagctgtttcagtaaaagacagcaactcaagccgattgaatatatctaaaaactagtaatatgtagtataaaaaaaagattagaagaagaagaagaagattaacgacgataggattggttaagaatgattccagtggaagagagtgctcgcagtacgtgctcttgggttttttgtagctcgccacatgcagagatggtgacaggaccagtgtaacctaaattccgcaacttccgttctatacactcacggatctgaccagcaatccagcatcatacccactaggatccggaaagctgtccatgtcccaccataccgacgttttagcctccgcctcctccttgcttagcgccttcttcggcagcattatcaaaattggacatataatctcaataatcttcgatacgtagcagttaaggcatttagggtttctttcaacttttaactatatacacgaaacttataggcatagccgcataggcctatttatttctattatatatgttctttttttttgccttaatacagttgacaatgtttaattttttgtaacattaattacaataattagataatcttgtaaagatgaatagaagataattcatattttcactaatagtagaaaatattttacttttatattttggtttaatgaaattatcaagttttgtaacatctgttttaccaaaatttctaaaaaaataagagttacacagctagtcagtagatcctttaatcctcccaaaatcgcctcttcatctcagggcttagtttatcgacgatcctgtgagatctcgtataggtaaatatgactttctcttctcttcacggtaacgactaacgagcacgaatctaatccgtttccttgacttgtggtgcatatgattttatttctggagtggttttgtgcgatttgtctgtattgatttgttttggcctacgtaatttgggtcttcgtttctagggttgtggattagggttatgcgtttaaaaccttttcagtgatgattgttattttcctaaatgtttattttctttagttgtgagctttgtcttaatctggacttgcctacaagaatttacattactgccgtgacatgttctcacaatagatgcatgttgttgtgattttctctgctttttctcttgactatgttctctacaggaaaagggaagttagtagtgcatcaagatgaaagctcttattcttgttggaggttttggcactcgcttgagaccattgactctcagtctcccaaagccgcttgtcgatttcgctaataaacctatgattctacatcaggtactatgttctttaattaattgattttgtaattgtggttcttcttgctatagtgtcatggtcttatttttgtattttgttgtttatgagctatatgctcttttaagtgatgggaaatgttgttgcagatagaggcactaaaggcaattggagtggatgaagtcgtcttggccattaactacgagccagaggtaaaaagacttcaagtctttaaaactttcctttggaaagctatatttgatttttttaatagaagatcttaaaatattgttcaatgttgaataatcattcagcaactgctagtgatgtccaaattctcaaacgacgttgaggcaactctcgggatcaagatcacctgctcacaagagactgagcctttaggtacagctggtcctttggctttagccagggacaaactggttgatggctctggccaaccattctttgtccttaacagcgatgttattagcgactacccgcttgaagagatgattgcttttcacaatgctcatggaggagaggcctctataatggtgacaaaggtaaattatttttgatgaaacctttaagcatttgtgttcatgttttttttactcattatgatataattggtttaaaaggtagatgagccttcgaaatatggagttgttgttatggaagaagccacagggagagtggaaagattcgtcgaaaaaccgaaactatttgttggtaacaagatcaatgctgggatttatcttctaaatccttcagttcttgatcggattgagctaagaccaacatcaatagagaaagagatcttccctcaaatcgcagaagcggaaaagctctatgcaatgctacttcccggattctggatggacattggtcaaccacgagactacattactggtctaagactttacttagactctctgaggaagaaatctccttcaaagttagccactggtccacacattttgggaaatgttcttgtggatgaaaccgcagagattggtgaaggatgtttgattggccctaacgttgctataggccctggctgtgttgttgagtccggggttagactatcgcactgcacggtaatgcgtggggtacacgtgaagagatatgcgtgtatctcgagtagtatcattgggtggcactcgacggtcggacaatgggctcgggtcgagaacatgtccatacttgggaaaaatgtttacgtgtgcgatgagatatattgtaatggaggggttgtgttgcataacaaagagatcaaatcagacatcttgaaaccagatatagtgatgtgatgacaatttggttgatttgtccgtatttttcatttttttgtgcgaatacgatttctaatttaaagtcatgaaaaagtaaaattttcaatgttttataagagtctagctcctagtaagcctttcgacaagtttcctaagaatatcaaagacgctcttgagattgaaggttatattagtgatgtgtcaatcttgacatatgatgctgggaatatatgttgtttgaagttagatctaattaatttatgtgtgtctcttgagttaaaagatgtttgatctaagtgaaatcatgagaagaggtcgtgatcttgttcctcctttttgtacgtgccatggccttggtcgtgattctgaatttttcttaggtacattgctgacaattgaaggtcaggatgtagcaaatcaatgtatcatgcgatttggattacttaagaagtaaaagagatatcagtctcagcgagcagataaaacttttgttcaaaatgatccacagagcagacgtacgatttaatctttcaattaatcatacaaatactaggaaatgagaaatcattagcagagattataaaacctagggcattgatgggaaagggattaaaacagcaaaacactaaacagagtttaagagaacaaaaaccaaagtcttttggacagaagagattataaaagtgaaaaccacacgccctagcatagccttccccgcggtaagctcccaagcagtgggaggagccctgggcacccttctccacaatatggacaaggagtatcgtcgccctcgtcatcttcttcggatctgaaagtctcttgtttgacacgagatattaggctacgtaattggatccaataggctttcccaaaaccatacagtgtttacatacggaatttgcggcgcttctggtgaccagtcattagccacaactaagataacattgtaactcataaacatccaacaaactaagatgttcttcgaacttggtctctcctgggatgcttttggcgattaccatcagatttgtagatgtataatggggagcaggattttccactgaccaaaatgcaatttccactaacatcttgtttagtctctcactcttaccccctaaaaaaatgtatatatcagttatcaactaacatgtaaaattgcactgcacatacatatatatatatatatatatatatataatatgtaataaaaaagaactagggtttaagtaaaggacaatcacttttgggttcgaagtcgattacatcatccagactgtcaggtttcttctcaccataagcagtgattgacacctcaccatgataacctacaaatcacagagatcgagatctctgggcatggtggtttcgacggagatcgagaaaacagaaaattagatttagaagtaagaggcctatcaatgttttacatttaagcacagtaaacatttaaagcccagcctagcccattaagaggtaaatctaatttgctacgaattcggttgttaattattaaaccatcggtttagttcatcaaacgcaaaccaaagccaataaccgaataatttctcgagaaaaaataatgactttccggtgaagatttttttttacgacggcttctcctgacaacggaaggtgttgagaaagtggcggaatttgattttgtttcctctcctctcctatctaaacaaggtctgttttcgtgagatccagatattcaatttggattcaaaatcgtgaattgggttttggattgatttctgttactggtctgtgtgctttgatctgaatgttgtttcattctctagttgtcagatttactgatgatgggaataagcaaaacggagatcaatttgcggagattgctttccgctgcacctaaccagcaaaatcagtcgaagctt

SEQ ID NO: 108 - DNA, 85710 bp, Arabidopsis thaliana
gaattcaagaagtttaaaaaggaaacggaaaacgtattgcatgtctcctccttttagatttaagaaaaccaagaaaccgattcaccagatgttagttatcagcttaatgaatgaactcatctaatttaatactcaagatttacctgaaaagcctccacaaagctgctaaggcttggatttggtgagaatacacaagtgtgattgcccagtgaagagccattatatgaagtgttgcaaaagtaatgacatctatgacaaatgcggcagatactgtggcaccaaaagtaattccaaggatggcaattactcttatcaaacaaaagatgaaagaagccatgaagacccagagagtagaccatatctgtattacattaagagataccatgcccaaaactccagccaattctgtatttaacttaaaacccgctggaactcccatcaaccacacactaccagaccgcaaaataccattcgtaaactcctttgcaaagtcgaatacaaatgagcagacagattcggtgttaaacagtagacctagaccaatcaagttccccaaaacaagatcaacagccatggccgaccatgtagaatgtctttgcagtgcagcttcctctgcatgtttcacacaggatatggaccttgagaaacccagaagaattgtcataaattaataatcgtgtgaaacttctcagaaaaatgacaaatgcattgcataaaggtatctagaattaaactttttttatttcccaagattagtaggtaagcagttgttgttagaaaaaaaaatatgaagatgcaattttgagccaagggcaaacagaaaaagtttacaaatctaactaaagaagaaaatttgggtatacggttgaacttacatcatgtcaatctcttcaaggaagattggccaatataagatctgacaactacgtatcctgaagttgatccatgtattcttgagtaccctcctcgatgcgatgtgcacccatgaaaaaatcagaaaacttgaaagtaaatagaagaattgggcaaggctataatacagacttgataaagagcctaaaattgtggcgagtaaccgccatgttaaagaagatatcctgaaaagcaagatagaagcagttggaacaactaacaacaaagaagaaaagaattcaacaaggcaaaaaaaaatatcacgagggcttacaagtaactaatggaaaagttctgggaagaagtctccagctgcgtggatatcttcttataggcaatcttggcagctgcggcgcaatttaaggaaagaataacagtttcctgcttacataagaatgagagaatattagtaacaagtcgagaaagaaacaccacaacaaagagaagcattttggaaactactcaaccatttcattcagaggtttcctattgtgaagatcatcaacccacttgggtttcttaagaggagcttttgtctgaggagaagaattcgaaaagcttaacgagaaatggtgagaaccaaacactggagtgtcatagactatgacctgacaatgacatgtccatgtttaagggagtcaaacactggcagcgtgtaggttcagaaaagaataaaacaagagaaagacatcatgacttacatacgtggacatcgcattgagatacaatatccccattccagtgtatatgatgcaatctagaacttgaatggaattccataattctatgctctgcagaatcatgcaccatatgaatccagtaatttctcacagaatctttcctgaaatcctctaataagccatcaaccttatgacaaccacaactgaggccactatatttgcaaggcctaacataagctccagccttgcgggacatatctttgtctcttataatctttgatacgtttccattagcattacggcttatatcataacgaccaaggagtgtaaatgctgccttgtcccgtaaagttgagggcatcttctcatttgtttcacggagtacatcctgttagaaatcacaaaagagaaacgtcgcatacactgtttatcaaaaagctagagaaaaaggattttttgttttgttgaggtggagttattacttggagcttagatccggcattggacaaggagctctcatcagagatgaaggacacaacaacgtcaagacaagaagaggaatggcaaacgaaccacccaaacaatagactgtgactcaaatcatcagttgatgcgagctgtttaggcaaccaaatcctacattttctcttcatttcagctctctgccacacaattcccaaaatgccaaacgaaagagaacaacatatcaacaagaatttgaaaaagtgaacataatacgagaaaattccaaaataaaagagagtaatttatcgatctaagaagacacaacttcaaatgtgaactagagaactatgtaagtaaagtaaaaccccagaaaaatactcgcatcgaagaagagacgatgagtagtatcaacttctacaaggcaattggcgatcggaaagatgaaccgagattcataacacaaatctgaaccctagaaattcttcaattcaacttaaatctaatcacgaaaagacgaacctcgtgtttcaggagagaaggaagtctagagtcgaaacttggttctgcaaccggaagaaagatacattccggcgacgagaccaacggcgacaaggggaagagatagatatttttcactatgggccgggcttttcttaataacgaggttcactggattaaacaaatttgaattcaaccaacactacacactttgttctttttgttacaatatagtggatttgtctaaattctcaactatgtctagaaataaactgtagaatttatttctaaaatagatttttattaatactgtactttggaaaaaagctgaggatgttattaaatgcttgaagatttcttagttaaaacatacaaacacacaaaatcttaaaagtactttgcttatttgataatccactaaaatcatatgaattttttaaaatgaattgaaataaataaatagtcgatgtggatttaaaattgttttaaaatacataaaccaatataaactttccaaaatgactacactgatgaaagctaataataagtcgatacaggttatactaagcaacactatcagagagaaaatctgtgctgtcttgttgcttcttcctcctacgagcatcaacaagcttactagaatgtgttccaagcacttcggtgatggcttttggcaaccagaagccaggccgctcaagatatggtgcgcggtcaataaccaatggttctctcaaggttacatcaatcccctgataagtccacaatgctagtgttgctgcacctttgaggcccagggataaccagccaagaccagccactgaaatgtctatgcttttcacgtcccagctatttcccgacacctgaatctccttctcttcccatgttcccaattcagacgctctgttctctccaattggtggctatacataaaagtaaaatgggttctccgttacattctgatgttgcggaaaagaggagatgcgcaagaaacaagctttacttacctgaaggcgtaaaccggaatggcccttgaatatttcttcggcattctctgtttttcctagatgcaatgaaacactatgtgatgcccatattgtaatgtatattgtttcaactgaagcagaaacgaggtctagcctgaccaggccaccaatgtgaacagactgtcctgcctgcaaatgaaagattcaacaaaatcagcttacttcttgcaataagaaattcttctacttgaagctgtataacagttcaagtaaattcttcttggaacagtgtactggtaaaaagaagctccagggtttagaacattagagattaagtcatcaattccaaaaccaaaggcttaaaaataagtaagacatagcttgccttgactctgtaactccgaggttgaacttccttccttatctctaccattttccgctcctctgaattcaatctcagggacataaggtagggatgcaaaaggccgggagtgtcatacatcttagcctttgcagacaatattccgccaattttcaatattccaagagttgttccaggaactggagcttccgtgagcctcgtgacctttgcaccatctttcttggataaggcattaatcaaagtagatttccccgcgttctgagctccaataacccacacatttcctcttggaccagccaactctttaatgtaagctaacagattcttaacaccaatatctttgcgagcactaaccatataaaccccacttagcttaggtgctcctccagccttggcacggtggcgcacccatcggtctaaccgagctggtgaaatctgtgtaggaagtaagtctacttttgttgcaacaagtacaagttttgggaggtttttgctacccttaggatcattttcagctttttgaagcacttgaaacagagacttggcagctcgtttgggaaacgaaccatcaaagtctacacaatcaacaaccatgactacaactgtagtgctggagttactcatcggtttgatcagtctagttgagatcaacctatcgaaatcaaaatcgggtaagagattctctgcagcctgattcttcacctggccataattcctcagagaatggcaacgagcacacacagtcacatcatcataattgtctttctttgcctcctctctagctatcttcttcctctctgttttggaaacccgtttcttcttctccttctcctcagtgacattaccatatccaacaccagccggagcaaaacatccaattcaacatcattcacttccttcttttcttcccactcatctgattcccattcaaacccactctcactttcagagttgctaccttctattgcattcttgatctcatcatccatttcatcatcttccccttcctcctcctcatcagcatcatcatcaaccatttcaaacccagcaagctcatcattttccacatgttcatcaccttccaagttattcgcaatgacctttctcttctgataatatccgggtaaatctggatcattgtcctgcataaaaatcccacaacctggacaaataatcttcccatagtcctcatcttcatctcttccttcgctcatgataagattttttgatttcttcggaaaaatcgtcccgttaacactctccacgctttgaacaacttgttctttcttcacagctaaacacataaccgaaactgcacatttcttcttcttctcattactcaatcctagtcaaaagttgagtactttctcagatatccatcacgaaaaccagaaacttaaaccgaatttcaggaagatgaaatttacctgagaaaaatggaacctcgggtctgtgtatcaaccggctaacgcgaaagtttccgtcttcaagctttggtttaacattgcaaatcgtcactgtacttgaaatcaaaaccaccatttcgtttgagagcgtgtcacttctgaattgggatgatatcgcgccgaaaatttgccgggataagcaactccgtcgacaggattagtcagagagaatcaaaacgcagcgtattggctcgagcctgacttcaatttttcaccttaaaccctacatataattacgtaaataccctccaaactcagatgaaacgtcgacaacgagacatagcgtaaaacactgattaccccagcaaataatttatctaatgattcgtataagttttgcaaattcggttttgttgattcgctttgtgtctatgtgactaaactttatgagaatgaaggagaattacgtggaagacattcgagactcaaattttaaaacagagtcttaaaggataaggttgtggtgacccattacgcggacaagaaacgaagcttaaaccccattttatattttagtcggagctccggtgaaataaaatggcggcaaagattattggtggatgctgctcatggcgacgcttttacaggaagagaacatcatctcgatttctgattttctctgttcgagcctctagttccatggatgacatggacaccgtctacaagcaattgggtatgtctctgttgagtttttaggagaagcaaaatagtaaatttggaactggttttaggaaatttgttctatacagattaaagttgagagctttatgattttggaaagttggtatatatttgttgagattttgaaaattttgtctcaggattgttttcactaaagaagaagattaaagatgttgttcttaaggctgagatgtttgcaccggatgctcttgagcttgaagaagagcagtggataaagcaagaagaaacaatgcgttactttgatttatgggatgatcccgctaaatctgatgagattcttctcaaattagctgatcgagctaaagcagtcgattccctcaaagacctcaaatacaaggttctttttgtttactctaacaaatcttcttgttttttttttgtatgaaagagatttagtttttaattgtgttttgttatttaggctgaagaagctaagctgatcatacaattgggtgagatggatgctatagattacagtctctttgagcaagcctatgattcatcactcgatgtaagtagatcgttgcatcactatgagatgtctaagcttcttagggatcaatatgacgctgaaggcgcttgtatgattatcaaatctggatctccaggcgcaaaatctcaggtcagtttcatcattctcaaggcacttacagtttccaactctttgcttgtaacttagtttctgtttgttcttaaacatattttgaggatttgcagatatggacagagcaagttgtaagtatgtatatcaaatgggcagaaaggctaggccaaaacgcgcgggtggctgagaaatgtagtttattgagtaataaaagtggcgtaagttcagccacgatagagtttgaattcgagtttgcttatggttatctcttaggtgagcgaggtgtgcaccgccttatcataagttccacttctaatgaggtatacattataagttataactctctttctcgtaactaatcactttcgtgtccattatcatggcccgggaaagaattaaaagaggttttctttgcgccaggaatgttcagcgactgttgatatcataccactattcttgagagcatctcctgattttgaagtaaaggaaggtgatttgattgtatcgtatcctgcaaaagaggatcacaaaatagctgagaatatggtttgtatccaccatattccgagtggagtaacactacaatcttcaggtattcttgagtgtgttgttagttgttacactttggtttactgcattttatgcagattatataacatgaggtttttgatgcaggagaaagaaaccggtttgcaaacaggatcaaagctctaaaccggttgaaggcgaagctacttgtgatagcaaaagagcaaaaggtttcggatgtaaataaaatcgacagcaagaacattttggaaccgcgggaagaaaccaggagttatgtctctaagggtcacaagatggtggttgatagaaaaaccggtttagagattctggacctgaaatcggtcttggatggaaacattggaccactccttggagctcatattagcatgagaagatcaattgatgcgatttaggcttaatcaattggtactttaattgctttttgttttgtatccaaaaagcaacaaatggttgcttgtgtgtgtatatatataaccttcttgtccagaaccatatatgattctaaccatcaaacaaagataagaattggtgactatgtgctatactctacaatatcaccatgaatacttcaaactagacttttgataaattttgaaacggttattaccaataaaacgaaaaccatgaaactcttgttttaattatcagattcgagaaagttgtgtacaaacatagctgagaagggatgtcatcgtgtcacgttgattacattatggaggtattttgattagccttttgttatgaaaaagtaaaaggtttggcagaaaactctataatatgttgtagagttgggcagaaactttcattactatcaaatatctagtaaatctaattactttacgttatccgaagactaattatttttatcagtttggcttagacttaaatgcatttcctcagctaattactttaataaattaaaagctcgttggattcgtattaaaaaaaaatctaatttattgtttaccaaagttttctatgggcatttaagtatttgaatttaaagttatcgacttttgactacattgtaatactcttggaaatattcaaaactacatctcttagtatataatataacaaaattcactagaccagttgtgtgtttagaaacataaaattaaaatactaaaaactatatatgatacatatcaatccaagaatatgtgaactcataataattcattaatttaacgtgattatttttctaattatatcaacatttgacataatttttagttaataaattaattcaatatagaaaaaaaaaaaaaactcatatgggcttgaaatattttataccaaattaatgatgtattatttcgttttatcattttaattttattggaggtagtatatgtgtatttcattcaacaacgaaaaaaaggaaaatcatattttgattaaaattgaaataggaagaaaataagaagaaagtgacaacaacagacaaacggctccgtcaccaaattgacgagagagactctctcctttcaaactctttttcagtttcaacttcttcgtctccctcccacaccacctctacatatatacattcgattcacagtctatatatcttcttcttctatgcctctggcgtttctctcgcatggcgggtctatactcttcctcctcctcctcgaaacccactctgtcttcttctccttcttcatcatcttcctcgcgtcttttcctgctcgtgacccttcttcctctctctctcgcctgtttcgccttcgttctccaatggcgtggcggtctcgacgaccccgttacgcattggtcaatagatcatcacgagtttcccggaatggttacaacccaagagaaacggtctctgcgtcgttcagtttctgattcgggttgcgttgatcttctaggtcagagtcgttccccttcgtttccttatttccggaattggaaatttgattaccactcggatctgaaacccagggtaagcccttgtgattcaattttgggttttcctgatttaatttgatctaagcgtgttcatatcttctgatttccatatatcgttgatccttggtactttgattatgaaaagattgtgactttgtgcaaaaatggtagatatgcattacaacaagcacttctgctggcttagagcaaacattgccatggatttactttcacaaagttattggagtttcaacattttatctatttgttgaggggaaggctgcatctccaaatgtgtctcgagttttggagaccatccctgtaagctctggagcttatgaatgatccctttatttgtttttctgacttagtattttcttactgctaatacgttctgttttgcagggtgtaaaagttatttacaggacaaaggaattagaagaaaaacaggctaaaaggtatttctctggtctgcatctttgtggatattggtaatggatctgctgtgatttcattgtgtcacttatgaaacttgggattttgttcctttacttttagatctataaatccactaacgtgattttttcaacagccggatatggaatgagacttggctgtcgagcttcttctacaaaccgtgtaactatgaattattcgtgaaacagtccttgaacatggaaatggcaatcaccatggctcaggtatctcttactttttaccatatttgttgaatatggtttgtggtaatagcactagataatgtaaaaaagccaacggtctctcagactctcacgccattttatgcggtgtatttaggacgctggtatggaatggatcattcatcttgacactgatgagcttatacatccttctggaacccatgaatattctttacgcaagttgctgggaaatatttctgcagacgtggatgtagttatctttccaaattatgtgagtcttacagttgtttggatttcattttttatcttgcgaaaaaacttcttctggcttcatcagcattgtctgtttttcaggagagcagcgttgagagagatgatatcagggaacctttcagtgaggtataaaatttatcatctgaagctattttgccaacatgagaaattgttcacatgattgtttgtttacccaccataggtacattgctatctttatagatctaaaaactactctatttgttgcacattcattttattgtaggtatcaatgttcaagaagaattttgaccatcttctgagagatgtctactttggaaactataaagatgccactcgtggaaatccaaactatttcttaacctatggaaatgggaaagctgctgcccgtgttcaggaccatcttcgtcccaatggtgctcatcgatggcacaactacagaaagagtccaaagtatgctcttttctcgttaaattgtctatcatttgactctttgtatctggcattgcttccctctgtatataatatgttagattctactgcggtttattcaatagaagcttatagtgggacatggacgagcctaaggctgtcacttacaattgttttaaggtgctaactattttgtggctgattcatggcatcttttctacagtgaggtcaaacttgaagaagctgccgtgctgcactatacttatcccagattttcagatcttacttcaagacgtgatcgttgtggctgtaagcccactaaagtggatgtcaagagatgtttcatgctagagtttgacagagctgtgagtggagatttatagttttttgctttatatttcctgcatcgttttccgaaatatatagtcacagctcttggctatcacatgtaggcatttattattgcttcaacagcgagttcagaggaaatgctgcaatggtattaatatagatttaaatataatcactgctcttcatcccattttcaactgctgcaatctaaccagcttcactaatacaggtacagagagcatgttgtgtggactgatgaaaaattgaagttgaaactccttaggaagggaattctaacccgcatttatgctcccatggttagttccacaaactcaaaccacgctctttatttgacatgaacgatcagtgtttggttttccacaagctatcatctcttacaggttataatccaagagctaagagaagcgggtgtttttagctctgtggtaatcgcagctcacaagtctccttcgaagaactcttcaactgctgattcgacatcaggcattacccgagaatcatctcaggaaactggtaagaggagggtgttggaattccatcttgatgttgacggtgaatcccaagcatcagcggtaccaccacaatcgcctccaggcttggaagcaacccagatggaactataatatgaaacgtgtttacaaagggtgggattttttagaatgatttatgaacagttttgaacctgagctctggtgtacatttaggaaagttttcgtttaggttatacacacagatgattctacaggtgaagaggaatgtcatatagcaggggttgtatcatacttgatgattctataacttggaatacaaaatcattgtcttccagatcggactactagtcttcttttgtgctcctttatcttcatatgtacatgattgatcctcagcattacacacttgtggtttttctttcctctcgctctgttttgctaggtccttatcaattaggaaggttctgcaattacgtttccagaactcctgtcatcaagtatcaaattatctctctaccttccattcttcagatttatggttttcctgaaatgtgaagtttggtttctcaacatctttagcttcttatgagtcactcagctgatgtcacaaacagcttcatgttgacttaaaccttacagaaacttaatgtttcagactgagaacatgagcaataatttagaagagagtacttaagtcaaattagtagcaaccaggcattgacaagtactgataaggttgtggaccataacaaccaataagaacaacttaaaagaacttatacatgttggacgtatgatttagtagttactgcattgtttaaacttttcttgttaaaatctttcttacactttgatacaaaagaaaaagatggtcatattcttaaatactttatagtttgtgcctttttcatgtgatacataactctgaaatctaaaataaattcttattacatacagaaactattcaaggtggagacatttaggaaaccgtacaacacacagaaaccagtccacttaacattttaccaaattaataagtttaataatatcatctctaatccaaattttgaaccgccatggtttttgtaagccttgcgccgtcaaagtttagatatccgccatggtttgggaatgctgaaacgccgtaagagaagtttcacgctcagactcgtaccctttttgggtatactttcggatggctgattctatggatcttgttttgcgaagacgatgagccaagccaacgccatggtttgtgcgccgccgccgccatatctgccgtgatttgtgaattaaacgctgggacagaagtttgctactcgtagccttctttttgggtatgatatctgagctttgattccaaccgtcgagactaaagcatcccgtagtctcattgaaggtttcttctaactacagctatgcgatcaaggttctgaccacagcgagccttacaaaagtcaatgtaccttatgtagacagttgcattcttagcagtgagagaggactcactgggtggctccatagtttgaatggctactgacacaatcctcaagccggaaagatcatgatccgtggtggtcctatcagatatggcaacagaaagttccagatacagacgaatccagtcattggctcgcagctctgattcatcatccaccacgtaaaatcggtttctgttttcgaaagggttctccagcgggaactcaggcaagctacccatgcggtagaattctctttccaacgacgttttaatgattgtccctaaaatatacaatgatgaatgaaatactagttgttgtaataataataatgatgtgttaatgaacacgcctacccaagtaaggagtcacatgtagtataataataatttaattacctggacgacgtctttcagcaataaaggaggtcaaaacaagccggccacaagcttcttcataaacggaagtctgaaaagtaaaacgccttccactagatggctgcattgcaaccaaagtaatgtagaaacagcaagcaccagcagccagagtcctgttgtatctcttaacgtgagagagctttaagtttgtcccctgataaatcaaaaacgaaatttgaataaaaagaagagcaagagtggataaagaaagagaagaaaggaagacaagagtcttacactttgattaaaaaaaagatagtatagttagtaattgcctaattaatttcacaaagagagatgataatcaaagaagttaaataagtctatgggatgcattcttaatagtaatcttgttaacttctttcttacattatgagtctttgattatataaaaaaaaaagatattagtaatttgcctaatttcacatgaatcccatagacttatttatttctttatactttgcttttttgggcctttttgataattcataaataagtggtgttgatacgatgtcgtattgttgtgcgtgggcaagttgtaattaaatgctacaggctttgaagcttcagcgaaaagtggaagaagcaaatccagaggcggggaaccagaaatagccaacggatccgccatgactgctcgtaagagaactccttcagtgtccaattcggagaaactagctctacctgaacctgcatcttccccgacggttcagaagacctctgtttccggagaggatttccagctcgcgccgccgaaattgggcgtgattttcgtgatctcttcgcttctgtgttcgctttatctttaccttctctgtttccactacaatgttgacaatgagctcaagcgtccgatcctcattaacgctgggcttagcttggttggattctttgtcacactcaagttgattcctgtagctgctagatacgttctgaggcgtaatatgtttggttttgatatcaacaaaagaggcactcctcaaggagaagttagagtgtatgtttttccttcttagatttgtctttgtttagttctcagattagtgttcagcgtttttctagaaatggatgtctcttagatttgattttttgtataggaggaaaactatgagatgtctcattttctgattgatgttctatggatgtttacgcttgatttgatctcaggggacttaaagtcttttgatgtgcttattttcagcaatcttatttctttgtaggcctgagtcattgggaattgttgtcggtattgtcttcttgatagtggcgattgtatttcagttctttaatttcactgaagattcggtggtaagtgtcctggtctcaaaagctcaagcttgatcatttatttattgtgaactatgaacttggtagctcttggctcatttactttgaatgcaatttatcaatctggctaaatgactcggtgcagtggcttgtggagtataatgcagcactggcgtctatttgcttcatgatattgcttggatttgtagatgacgtccttgatgtgccttggagagtgtaggtgcagttctcattttgttggattaaaaattcatgatttagttttgttttcttattaactcttgtcaatttgcaggaaacttctcttgccatcttttgcaacccttccactgttgatggcttatgctggacatacaactatcgtcataccgaaacctttagtttcttatattggcttggaagtgtttgatctaggtacaattcatcttgtatatagtgttaaaccatcaatagctattttgaaattcatttccttagttgtatatttatcgtggcaggacgtatatataagttatatatggcgctactggctgtcttttgcacaaattctattaacattcacgctggtttgaatggccttgaaatcggtcaaaccgtagttattgcagctgctgtaagttctgctgtcaaaatgcgtcgcaatgcttcatttttttggtcccatttttccttctgttggtttctcgtaagtaaagttatgataaatctcagtaacttgtagattctgatacacaacgttatgcaaatcggagcatctgttgatactgagtatcatcaagctcatgccttctcaatctatcttactcagccattgatggcaacatccttggcaatgcttgcctacaattggtaatctttggatctttcaagtcattttctcttaaatcaatcaggtaaactagcaaagcagaatgctttctctaaccacgttcatgtcccctctttggtgatgttaggtacccttctgcagtttttgttggagacacttacacagtctttgctggaatgactatggcagttgttggcattctcggtcacttcaggtatacttctaaccataccgtccttattgcaatgtacttagattcatcatttacatttaacttatgtgtgagccttcaattaactaactacttatgaaactttgctttttgcagtgaaaccctgttaatcttttttcttcctcaagtgttgaactttttactgtcacttccgcaggtttgatacctttctccatctcacactttctgttacttttcaatacatttgaaagcatctaacttgctattgtataactcttcagcttgctggcattgtcaaatgtccacgacatcgtctccccaagtaagctattttttgtccatttttcataagaggcaaagccaacaagtaaacaacacatgactcttcctctctcttttttaaaccaggtatgatcctgctacgggactgttaacaggaacaaaagatgggacactcgtgaacgtctacttgaggatttttggtaggaaaacagaaaagtctctatgtattcatcttcttgttttccaggtaaacttgttaatgcccatattatcatctctaaatacaagttggtttattctgagagagagaaatcacaagattggtgttttgtgtgttctattgcaggctcttgcttgcgcattttgtttcatgcttaggcattttctagctggttggtacaaataaatctctgcaacatgaagaaactctaaacctgttcctcttttcatctctctctctgccttcacaaatcatacaaacacagaacttgttttgcttcatgtccaacaatctactagaatcatcgttttagttcacttatatagagagttttcatctaaaggcgagtgtatctcaacaatataaagccaatgaaatgaatcagaacaaatttgtcttggaatttaaatttaactacaaatgctgatcttattttgataactttgattaataaactaaataatttttagattaaagttttgctaatatagcatgcattaaatgaagtgtccatttacatatatttttgaattttaaaaatgcgcttttaatattagacagactactgtcgtactagaataataaagaatgtaataaaaaaatagaaggagaatcggaaaagaaacccacttatagaatgccatgtgtcaaaacataacaagcgaagtatgtttatatagtaagaaaactcttttgccctaaatatcccaaattgtcatatgttctttccttatgtggctctctcttctctttctctttctctttcctttttctctttcgatcaacaaaaccacatctctgaactgaaccaatttctcttctcccccttccggttatcggattaccagatctcgtttcccgcgatctagtttattctttgaaaaaggtaaatgttcaatttttttattttattcaaaatctcccctggattcaggagatgatgatttgaaattgacgatgatgtttgtgtgtaaaagtgatagaagcagaaatgggaaggggcaagatcgcgattaagaggatcaataactctacgagccgtcaggttacgttctcgaagcgaaggaatggattgttgaagaaagctaaggagcttgcgattctctgcgatgctgaggttggtgtcatcatcttctccagcaccggtaggctctacgatttctccagctccaggtaccttttttcttttctctttggttgactttttttttgggtcttggtccatctaattggttgattgattgatgtagcaaattctaaatctcgatttttttttttctttcttaagtcgatttcttgttaattgtttgcaaattcaattgctttagagaaggaatcgtagatcaacttagtctgataatttgcagaagaaatcacttggtttgaatgataatatgttttgtaaggggaatatgagagtgtgttctctgtgttgttggagatgattacgatatttgtgtggaacatagattgtgagggacttgtggtgtttattgaaacatactaaatttggtagaaactttatcagaagaggaaaggaggggagaaagtggttagtggttgaagaaaactctaaactctagagaggatttagaaagaatcgtctccttttcactgttcatttactttattggcaactagttggtgggtttgatgtacctaaaatgagctgcattatcttctcttaatatatattgttagtacacaagtgggggaatcatttctgatttcgttgtcatccataatcaagtttttgtttttttaattcttcaacttggtcatttgttaatgatatgtaggagtatagtctttctttttgggaacattttgcgatttgttagaaaaatattatatcttcaatcctttctgaatttctactttaggagttcattcatttctttatttgattgtatctttcgtgtttacataattgtttattaaaaaaggttgaataaaatctggctcttagatctgtttcagagggagaaagcttccattgttctgcagagcttttgttgtttctctgttttttgaactgagactctgtttttttctttttttctcttcaataaagacagcaagatatctatactgtttactgattagagttggctctatttacatcaattttgtctggcttctctcattctctgcttaaacttcatacattatgttagatttattgcgaatctgtagttggggtgctgagaatcctgttccatgtagacagagatggcttagggttaactaaatctatttaagtaagaaaatttgacactgaaagatgtaaggataaatgttgcagtggatgttgcttgggttacattacctatcaaccacactctacaactatgaaactactctcttttttggcagcatgaaatcggtcatagagagatacagcgatgccaaaggagaaaccagttcagaaaatgatcccgcttcagaaattcaggtactccttttttttgttactcctccctatggatttcaacgagtagacaaaacaagtaacatactacaacagagagactgttactcgattcttgtactaatatgttagcctattacaactcattagcatttctcaacttttaattcctctcaagctgatcctgatatctaatcagagttgcagaccataaataccaccacacatcatatgttgaagtagggtttgcagtttgctataaaacacaagtcatgccacctgaacatcagattgcatacatagtgttgcattttattttgtcaagaatccgttgtagactagataacatatttatccgaaaacaaaatacttgtttacagtttcaaacacctgaaaatcatttctactatattctagttctggcaaaaggaggctgcgattctaaagcgtcagctacataacttgcaagaaaaccaccggtatgttttgcatcctctgagtttgtcaaacactctcgatagtagtaacaactagagcagggaaatatgtactaaaatgcaaaatgataacatacgtgtagtccaaggttagaagattttgcagaacccaaaactatcctaccatttgcatttgcttagtaaggatagtcgatataaagaatagtaagccaaatggattaagagttgtatacataaacacatctaaaccatccataagaaggaaataaccaaacactttcacactccccatcgttttcttgttttgctttggtgaattaggaaatgtatatagtaactctggaaaagtatgcatattcagaagagcttgtacttgacaggcaaatgatgggggaggagctctctggactaagtgtagaagctttacagaatttggaaaatcagcttgaattgagccttcgtggcgttcgaatgaaaaaggttttgatgctgtgacaaataagtcaaattttggaaccatttagaagaagtaatggatgtactctatctacgctcttcttttgccttttgcaggatcaaatgttaatcgaagaaatacaagtacttaaccgagaggtgggactatggttactgtgatataggttttagacgttttccatagtgttggtaagcacattgctaattctttttttattcggttgcaggggaatctcgttcaccaagagaatttagacctccacaagaaagtaaacctaatgcaccaacagaacatggaactacatgaaaaggtacctttgggttttgggaagtatctgggagccaagatactctttaaaattgctagaacatttttttctttcttatctgatgataatatgtgcttattccaggtttcagaggtcgagggtgtgaaaatcgcaaacaagaattctcttctcacaaatggtctagacatgagagatacctcgaacgaacatgtccatcttcagctcagccaaccgcagcatgatcatgagacgcattcaaaagctatccaactcaactatttttccttcattgcataatataattcggtgtgccaacacacttatgttgacctcgtcggaatcatatcacaattcactgtgtcagcttgcctctgcataagcgaaaataaaaacataaacatgatcagtttgcattccatatctatcaaacaccagctttgtaacttttaaaactttttctccgtgcaaagacctttggtttggcgcttaagcatgtagtttgatgatcaaaggaaatgggtgttttagcataaagttgtcacccttccgttgcattttagcttcccatccaaatcaatttgtaaaatgtgagttagtttgcagcatgaaagctgattaaatatcagtcccgttatcacaagaggtaaacaatgaagagccacaacattgtaagacgcttaaataactaaaaagaccttagtatacttctggtagattatcatggttcatgaggaataatgacgagacgaaaatgtttaccaaagaaaacttaaaaccgaagtcgtcttaaaattattgaaaacataaaaccgaaaatgcatggagagttttaacttcttccttttttattcgtaggtaattgttctttctctgagatattcgaatattttaagagctatgaatattttaaggctagttttagatccatatattctacaaattctctagaatatgaaagtggacaattttcaaaagtccattctttcaattatctctactttgtggactattttgacagatttctttcttttcgtctaaaaatacaaaagaccatatgtttttgaacttaaatttatatcactaaactaaattgtgtcttaaataacatctcaaaatttattatatttttttctctaataaagtaaaactccataccttacacgttattatatgcaatgtgcctgaaacttaaagatgattgaacttatggtgtcaaagaagcggtaaggctaaatagtaccattttcggctcgtctataaaacgagacgaagatttaagtcaagaaattgattaatttcatcatatcatatgctttgaaaagtttaagaatgtgcgttttctaaacaagttgattgctagttataatattgaagagccctatattgaactgatgaagtaaaaacgtacttgacttttcttatttttctggtctcattagtctattccttactattacaataagctcccatactcttaggaaacctttacgatacaagtcatttatctcatatcgctttatcgtgaagtgtcttcaaggatattagttgaaattgacaacatacttaggctgtagatttggaagaaacagtccccaaaacttctcagtctcgggaccctgcttcgaattctcatcgaacatagcaaatatataagtctctgtagctctccctggtctcctcggagatccatttttcacagtttgtatcaaattgttcacataagttctcgcattatccacacccgtcgctgctcctcccgctgtcggccaaccactctcggacaccacgatctccaacgaaccacctccagctttctctaatgatgcgtaaacagtgtctaagattgcgtggaataggtttcgatattggttttgtccgtcattgactacagttgacggtgcggtgaacagagtgtagtctaaccggatgtctcgcatgtttcccgtgtagctgaagtaagggtaattattcacgagcagaggagattgcttgcttgacaagaaacttatcaccggtgcgataaagctcctaaactccggtgtgaacgtcccacttgacggcggaaacccggaaatgcctctggtgtctatagccgtcgagaccttgatcccgaggcttgaaactgctctctctatgttctgcatcgcggggaggacaaagctcgcagcttggtctgagggctgtacctcgttcccgacagagatgtagcgaaatgtgacgtttgcatagttgcggacgttgttgcggacccatgtgtcggcttccgcttggctggaggcgagacgctggagatcagggtttggaacatcgagcacgagctcgatattggagccgcggagagcgttgagagtctcctggttgggatcgtacagccgcatccgccggatgttccgttgttggtaaagcgccacgacttcggacgcgggtcgcaggttgtttccatttctcccgtagcacactccgatttgtccaacttaaaattcaaaagaagaatcattagtgaaaagaataaaattctgaaaacgaatcagaaagagaccaatgtggtataatcaataggttaaaagaagattgaacctgccgtgtcgaagaaggaagccaatatgaagctgagaagaagcaataacagtggtaatgaggctaagaaactggatccattacacatcttcatgattaatgttaagcttgcaactttatatactaaaatcgtagcattttgcactaatttatagaaggaatggagggattcaagtcaatgaatgaaacaaagtcatcgcgtcatatcatcatagttttggaatgttatacattaaatcaccgttcatgaatatctctctaaacctatgctttgaaaagtctaagaatgtgagttttctatacacgtagctttcaataggcctaactagctagctagacactaaaatcttcgagttaattggaacgaatcctccagagccccaaaataaaatatccactcttaaatattcaatgaataatataacatttttgaaaaatatataggccggatatcaaactatcttaagatattaattgaaatttcttttataataatcaggattatgaatcactaatcttccagaccaaatgcgggttatgaattctgtgaaccattcataaatagtttagatagatatcgaagctttaagtcctcgcgttttggagtcatggtacaagccaatggtgatgatggcctcatttcccgcatatggagcttttggcatttttccagtttttagtgtaataagttgaaatgtttcatcactcattctaaatttactatcaacctaagtaatgcattgcaatggccagcctcatttcacgcatatgggcagctgcaatgctgtttttttctgcgtagatagtagatacgtcccttattacattatctcaaaatatctaaataatcaaacaataagcgtacaactaaattttttgacgatatttatgtaaataagcaagaatcatctaactgcaagtggaccaacccatttagcttggtttacatttatggtactttattgacaaaaatattctagaaattaatgtttttgtattgatcaaaacaactagttacatttactcaataattgttttttcaaagtttgcccatttgaagataaccaactgttgttgaatcttttcttggtttatataactcctccttgaacaaggttattccaaacgataacctgatttgcattttctcctagtaattaacaatactcgaatccatgtagtgtttggttgtgtgctaccaccacacggtagtttttctctttcatctctcgaatggcaaaccgaagttccactgtgagtccatgcagccagaagaaataatcagcccaacttgttcttttaagtcacagtttaacaagtaaacgaacacaaatacattttaggattaaaaacacagtaagaagataaagagaacctacatggcattttgttcttctgctaattcgcttttttaacatatcaaggcaataattggcagaaaacaaacaatccatgagcaatttgtcatgcatggttttaacgtggaatttcttaggcacatgtatttgtcaaccatttcaaaaaccagtcggagatgttacatactgttatctttataataatttttggttcattcttttaatttgcatagttatggagggttcattttatgcctatattaacgaaccataagcataaagtgaaagtagaaaaaaaacaactataaacctaatttaaatattgctacgtcaaaactggtacctagttacattaaaagtgacatatttcttacttgtaatcaatatcattacaactaaaatcatgcttcataaattctaacaaatttattatacggaaataatcagtgatttaacctaccaaaataataataagcataatcagtggtttgacgtgtcaaacatataacatctaaaaatagtttaaaacaaatacggaagcttagctaaaaaatactatattacatttttgattattcaatgtacagtacttgtagtgaaatggaatcagaagtatatcatatgaaaatggacaatcgaaaatttgggataaaagaaatcaacatatacatatacgaccctaggtgctagaagcctagatacaacaaactaataccactgggcctaaaatgaatgagcccaacaaagaatttgagacttaatgtgagcccatttgaaacctaaacggcaatcggagcctaaaccaactaaaccgaaattttaccgatggctgctcaaagcttgcttgttttctccttcacataccgccaatttcactacgagacccgatcgtttaagtttggtccgcaggtaaactgctcgagtataacctcaatcagagacatagatttcttcttctcgatttggctacgatgattgctattaaaaagttatgagcttgatcgcttttagtcgtcgtactcgacattagcttttgtttgttagaaatgcttcttcttggctctcttctagttcgccacaagctaaattctcttaaagattgtgcagtcttttgtagttagaagcgttgataggaatagctgaaataccggcttctctaagctatacagctgagaaaacatccgtattccactgctctcgaataaagagattatcacagagagccagtagaggaacatgttgccacacaatcaataagagcagcaaaagatccaccacttgtgtttatggtactctgtgacgctcaaagttaagttcaggagttgcctgctaaagtctttttatatattttgaactttcaacttctttttcctccattttcatgtatttattgtttgggtcttgattctgcttcataaatgacacgttctcaggtggtctcgttaggagtggaggccttgtgtggttggtgtgtttacaagtttaacaactggtgtcgtggcctactatcccttagtacattgagctaaaagatttggtgacagggaaaggtctagtttaccatcttgtatattaggataagcaggtaagcttcatttactgtctacaggaacaataagcaggtaatcgctactttcaatcagtaattcaagaaattacagcagatctatggaaagccatataagtatactgtgtgatactaacaagtggtcaacactgattattatgtgcacatgagaatgtccatcaacttatatgcatagatcatcattcttttatccaagtgtagagaaaagaaaagaaagtccattgtgtaatgttttacttttaagagttgctaactactcttctttgtgacctccagtctaaaatttggttacttgagttgtgacatggtattgttgtctttactcttaagcactgttcattattcaggaggttaaaacaaagggctaatctggttggtgaattttccagcttgtgaataaaaaaaaaagtaaaagttgaatttagagcaaaaaacaagaaagtaattcgagctaagcaaagctgagttaaaagcaagggaaggtttacattggaaaaattgattaccaagttgcttgcgcgcttaggtttgttccaatagctgtaatttacctagattagtattatgagtttacaaaagcacatagcacacggtataacttgtaacattttacatcataccactaatgtaaatcaaaacaactttagtttgaagaactttttttaaaatagaaagtttgtcgcccgacatgctgattatatttgctatatataccgtaggaattcaccacatacaatacaataacaacatcaaagaagcttagttttgttgtctctctaataagtctttgatctaataagtctttcttataattctctaaaatgtcgacctcaccatatgaaaaattgagcgaacaggagaagaagcagatgattaaagagatccaggagcaggcctatgaggcgttgctatacgcatttggcgtggaaaagaaggtacatttcgaaattatggtattgagaatttaaaattttacattcgattcgtagctaattaattgttctttctctgaaaatttgttttcttaaaatgcttatagatgatcagtgatgatgtgaagaacctattgaacatcgaacaggagtctgcagaggaaaagaggaagatggcgtacgaagcaactctgcttgccgccacattcagtcattccttggcaaaagaccgcgatggtgtgttagctacgttgaagaatcaactccatataactgatgactttcacagggaatgccagaatcgtgtcaggaacaacattttagtcgtccaattgactggagaagcatccggctcgaattatgtaggcgaaacagggtggacgactctcaggcgtatcagcaacaccatcttccgcttttaagaagacatagaagtaattttaatttcatctaagtagtaattaaataccgtatttcattgtctctgatctctgcgaccgaacatacatcatcgtcgccgttgataaataaattatgagatcctattttttctacataaataaaagatgagatcctatgtccaaaaatattattttcattttatattatttcttataatttaacattgtttcacttcgcagtgtttgttactttctaatttctattatatatgatccattttttaccctgaaaaaatatctaaattttgcgaatgaaagatacttgagaacaaaaaaaaaaaagaaatgaacaattgtgttaaataaaacttgttaaaggacaaataggaagtatctctgcctctttcgtaagctcaatgtgttaatccgatatttcttctatatcttaaaatgatcgaaggaaacaagtgtaaaaaaaaaaaaaaagatgagcttcgtctagcgtctatcatagtttgaggaagaagcaaacttttgtctaaactataatatcacaagtcgtatctacatatgtaattcatacaaaacaacaacattcggcaataactaatagagaagaatgtgtgatttcctctaagcttccttcctttgctatatgaaattcgttccagatggatatatagtagctttcgaattcttgatccacctttactttaacagttcgtttacctaattctcaaactgattttgttttcttctaaatacgagaaaagcaattaaaatgtagaaaactttaacacatcttttacaagtcaaaaattattaaatgtgcgtagaagataatttaacacgtctttcttaacagagaaatgaccagcacattgtcaaaaaaaacttttattctgttatataagaaaatataccatttatacattccttttttttgggtatagtgttatactagttgactatttctctgtctttacttctcgctgtttacaacgttccccactttctcaaaattagaataaactagaatccagaataaaattgtaaacacaacaaaatagttataagacaaaaagcacggtcgttatcagttcgcgtacgacagtggtaaaacatgcactttaatcaatcgttctctccttgtatgtaaaatgtatgttgatagtaacaaaaaaaagaggtgagaagaagttcgccaagatgactcatcgcatcatgcatactcaaaaacattttgctaacaagaattccacaaaattttgggtctcacattccctaagcaagcttgttttattattgggcctataggcccatgctattttttttccttatttatgcttgcagctcatttataaccttaaaaataacaacatactacacgctgaaagcgcattaattattccttattactacaacaagttcccaatttttaaatacgcttacataaaaagcccacaagtctctaaggattagttgaaattaacttcatacttagactgtcgatctggatgaaacagtccccaaaacttctcatacgttggttccttcttattctcatcgaacatagcgaatatataagtctctatagctttccctggccttctcggtgatccattcttcacatgttgtatcaaattgttaacataagtctttgcgttttccacactcgtcccgactgctccctctgtgggccaaccggtctccgacaccacgatttccaacgatccgccccctgatttctccaatgctgcataaaccgagtcgagatttgcgtcgaataggttttggtatgagtaccctggatcgttatcaacagtggactgggcggtgaacagagcgtagtctagatggatgttggccgtgtctcccatgtagctgaagtaagggtagagattcacgagcaagggagattgcttgcttgccaagaaacctatcactggttcgagaaagctcttatactcatccctgaaccttccttgagacggaggagacgtatcagtggtggtgtcagtggctatagctgttgagaccttgacttcaagccctgctccagaaaccgcgttctcgatgttctgcattgcttgtaagagaaaccccccaactgagggtttcacctcatttccaacgttgatgtaccggaatctgacaccatctctgtagctctgaacgttttcttgaacccacttgtcggcctccgtttgactggaggcgagacgttcaagatctgaactgggaacgtcgaggatgagctcgatgtcagagccacggagagcggcaagagcgcctgggtcagggccgtagagccgcattcgctggatgttttgttgtttgtaaagagccacaacgtccgatggacttggcaaggtatcgcctagcatcccgtagcatactccgatttgtccagcttcattttccaaaataagaatcattaaattgaataaatttgtgaagatggagatgattaatagatgttacaatagcttaaaagatgactgaacctgtgtggttgaagaaggaagctattacaaggctgagaagaatcatcaacattggtggtgaggctaagctccttgattcagacattttcttgatttttctatgattctgtgaaaaatgatatgttttaatcattccatttaccgcctaatttatagagccaagcctggggtgcaactgtgcaagtcagtcaatgaatgaaatcaaatgatctatcaatatcatctgttttgttatgtttcaccttaatcaccattataattcacaaataactctctaaatatacgctttgaaaagtctaacaatatgagttttctacacaagtagctatcaatagggtttaactagctcaagacacacgtgtttaatatgatgaatcgcccaaaccaatttggttttaaaatatttaaatcgaaatggttgtttgattgttaattataattttcttttggtaataggttggatcatggtaatattggccgttaatcgtacgtcaagctagcgtgaaccaattaatacgtcgttagacccacaagccaagttcaattatggttagatgacttttgttcacagtaaatttcaagattgaaacgactttagtgactaaaatgtttaaggtgccatggatggttccaagaaccactgtgaacacaaatcatgcatctaaccagaattgaaattggcttgtgggtctaaggacgtatttaatggttacagttgacgatcttgtttttcatggtctcaaccttgtaaaacacgttcgtattaatttatttaatttctaccctaagcttgtgattttatattgtcgttttcccccttcatgatgaaccatttgacctttttggatttctgtatcaaccattaaaccaaaaagaaaagaattgtgaaaatttttctttcaattaattaatttggttcagtaaaacacaaggtgcatagaaaatccacgatgaatgtgaaatttctcttgtttattttcttatagagaagaaaatatcaaaatacaaatattaggatgtgaaagaaattgttgtaacgttaaaaagagatactatttatcgaaaataataaatatctactccatcaacaatacagcgtctatttttgtcgtccaaccgaattataccttcttgtttgggcaaaaaccgaaatagacgtttataagaaaattcctcggttttgaatatatatcactacacaactacgcaaaacacggcccttcataatttaacccttgtggtctgaaatttgtactaattctttttgttcttactcattttctaacctgctatgctgtaagaaactatttaaacctaggtaagttgagataactaattttgtataaattttaagagtctgattacacacgacttcagttttaaagacaggaagtataattttacttgttattgataaaggcattacaattaccaacacgttaacagtaaagtcttgttttaatgaagtcattacttgtaaatgataagtcattacagtccctcaaactttatttattgtataatgaatgatagtaccaatatctatattagttttcaaatataaatataccattcccttgatagaatattggttcggctcaataaaagttaatatcatacttaggctgcttgttgggatagaacaatccccaaaacttctcaacataaggaggagtcggcttttgattctcgtcataaatggcaaataaatatgtctcgatttctttccctggtctcttcggtgtcccattcttcacatgcttaatcaaattattgttataaattctcgcattctctatgtttgtatcggttcctcctcccgttggccatccagtctccgccacaactatttccaatgatgcgccacccgatttctctagagccgagtacatcgcatcgagcatcgcatcaaataggttttggtaagatctaggagggtccgaaacgattcctgaaggagccgtgaagagagcgtaatcgagccggatttggcctacattgcccgcgtagctgaagtaagtgtagaggtttaagagtaaaggagagttcttgcttaccaagaaacgtatgattggttccattaccaccataacatctcccctaaacgaacctttcgatggtggataagactctcggagcactcccatgtctaccgatgtggatacctgttaaattccgtacaattataataaaacagagttgaaacttacaatttttgttatataaagataaaaagaataaaacgcaattaagttcttaaccaaatttacactaaaacattgaatatctcctatttttaataagataagttcgcaaatgttgaacttaaaatgaaattttgattaatgctaaaaagaatatttatcttatgaaaatacgtaatcgatatatatgagtaatgattataccttgatacgaccaccgagtccggctgctaaaaccgcccggtcaatgttttccatggcagggactaggaactgtgcgtaagagtcggagattttaacttcattcccaacagatatgtaacggaacctgacgccattcgcgtagttcatgacgtaggtttgtacccacgcgttagcttgtgattggctcgaggccacgctctgtaggtaagagttgggaagacccagcgttacctcgatgttggagccacgtagggcggctagaacgtcgtggtccggactgtatagcctaactcgttggatgtttttctgtttgaagagcgcaatggtttctgctggtgaagggaggttgttgccgtttcttccatagcaaacgccgacttgtccacctgttaaatatcaatccaatatttaatacattcatcacatgtggcataattcatgagagaattaatgtgttactaaatatttcatgagagaattaatgtgttccttcttttgtcatagaactaaaaaccttagactttactacatgttaatcctaatattttttatttctaatgaattatttacattcttagcaaaaataaaaaagagaattaatgtgttactaaaatttagtgactctattttttttcattgttgttaatcataaaacatatctaatcatttgaatatttgttttcaacttttattttcaagtatttgaaacatcagtataagtggtaaattataatttcaatatttaaataattttgttttaaagctaaaaataatagttaaaaaggtctcaaaagttcaagatattgacatggtttgattactctatgtcagggtgatattataatataatcacacatgttatattttctatatacataatgaaataaagaggtattaagtgacctgttggatttgtattgacgaagaatagaccgagaagaagggtcaaggacgccaagaatcggagatccatcgtcgttaggtgaagaaagagatgatttgtagaaaattaagagcgaggtggaaatcatttactgttatgacattgatcctagctagcataaacaatatatatagtaaattctagagaaagaacattaatatataaccaaatgtaaaatgtcaatatgaaactaaaattaatacacggaattaggcaacaagataaaataatgagttggtaatctctgaataattaatacaatggtgtaatatatggtaagctacataatcagagacagagagagacatttgtctttcttgactcttcataagtgcactcacaagtcaaacaacgcgtgtgatttatgagggcttagccgttaaaggtgtggttgaaatcaagtaaagaactttaattcagacaaaatcaaatgctggttgggctaaccaaaactactagtaatactaatggtctttaaacgaaatgagcccaataaagaacctgagacaaatctgagcccacttgaaagctaaaagccgcctaaaaaggaaacctaagcttaaaccagctaaaccgaaataattaaatggattcgttttttctcatctccgatccctaaagtcaaagattaaaccacactaaaccgaaattgtcatatgcgcgtaatttcttcgcaacattttgaccgaacaacttcaaaatcaaacgagcggacggtcaagattgtccgatcagtatcgtctttttagtcagtcagtcctgaacgccggctagatcaaccactccatctctcgtgctgaccacgctccgattctccatttctttcccttttgacttttcacttccaatttttcggtatcagatctggacgatggcttcacaaatctctcagcttgcttgtttctcatccaccaatcgccaatttcacttccaaagccgatcgtttccatgccctatgattcgtccccaggtaaatatctcgatatcgcatgaaaaagacttggaatttactcatctcgattagattacgtccatgcccaatactctatttgttctacttttcctgattactctcaaaaacgtttgagcttgattgatttagtcgtaatcgaatatttgcttttgttttctagaaatggttctccttgagacttgaattgcttctctgttttctctggttgagttggttgggaatgtaccatgtcttcaataacaaaaattgcctttttgttcacctttttgattgtctctatgtgctaattatcatatgttgagctctcttctaaattttttgggattgatagtgtctccactagtggcttattggctataaattggttcagtcttttgtagttaaaagtgttgatgggaatagctctgaaacaccagcttctctaagctatacagctgaggtttcaaaacctgttgttgagaaaacatccaaaccgtattccactgttgatgaaactgctaccaataaagagagcatcacagagccagtagaggaagatgttgccacacaaccaataagagcagcaaagatccacgacttctgtttcggcattccttatggtactactttgtgactctcaaactttctttcaaatcttagcatttctagcaaagagttgcttattgtcaggtaacacgctggtgttaataaatgatactttttcaggtggtctcgttgtgagtggagggcttcttggttttgcgttttcacgaaatcttacaagtttaagtactggtgtcctctatggtggtggccttctagcccttagtacactgagcttaaagatttggcgagagggaaaatctagtttcccttatatactaggacaagcaggtaatcttcatttattgtctgcaggaacagtaggggatattttgttaccacgactttttttcatctctaattcattacatcaagtaattactggtatcttactcatgataagtggatattaaaatcgagataagtatactgtgtcatgctatgaagtggtcatctctgaacattatgtgcctatgattctctataagaaatgttcattttatctatgaaagcatttgtgcttactcatttttctaaacctgaaattgcagtgctttcagctgtcgtcttctggaagaacttcacagcttattcgatggtattcattatctttgtgatcatgctgattgtttatttttgcttgcttgacttcaactgcttaatgttgtacttatgcagactaagaagctgtttccggccggggtttttgctgtcatcaggtaagaaatacgtcttgtgatctacaacagattctgatgatctttcgtggattcatgtaaccgtgtgtttacgtctttttcattgcagtgcttgcatgttgtgtttctattcatatgtggtgctctctggaggaaacccacctccaaagaaattgaaaccatctgcgactagtccttcatactgaagggactttacataggtttagatttaaaaaagtggagatcttctctcttttgataactctggtctgttggattactggtgtaattttatactctttacgaattgatacacttggttttgtttgtgacctgttctttccagtgtcataatctaaagttttgattttcttatttgtgagatatgctttgattgtctatattcgaatatcatagtaataaataaataaaaagagataaagaaagaagactaaaacataagtaatatagaaaagttattgctagctcaatcctgaaacaataataagaaataatgcgtctaccagttatacagtgagtaaacttgggaaataagcgatagaaagttagaaacccctttatgctgaaatttaaaagctaaaatcataagaattttgttccggatcatgtataattaaagtacggccagttatcttccaattatgaagcaaaatcttatttttctgaaatgttgtgattgtttttgttggcaaattcggatggcggcgacaccaaatggaagttctattcaaatcaatcgaatacgtcttctcccatttcttgcgagagtttaatgaccatatctcttgtttcatgtccttcccctctgatatacacaaacggtccttcatgttgcttatagtaactcgaccatcagtggtaaatggtattttcatactcgcttcaaaagatccactggaaagatcaaaacacactatatgccatttccattgcatgttgtgtttctattcttatgtggtactctctggagggcacccacctccaaagaaattgaatttatcttctctcttttgatgactctggcgagttggacttctggagtaactttatactatttacgaattgatatacttgttttgtttgtgacctgttctttccactgtcatagtcttaactcttaagttttgtttttcttacttctgttatatgctattattgtacttactattacgcaaatcagagatgctcaatgtaaggcagtaatttacgttggcttgcaaaaacctttaaatgcttagggtggatacaaaatgctgatttggttggaaaatgttccaatctgtggatccaacatttcaaatagaacaactccataataatctttttcaaagtaaaaggtgaactcagagcaagaaaaagaaaataattccagtcaaccgaaggtgagttttatcaaggaaaggcttccacagcaaaattttgactagcgagttgcttgcgcctgtgtgtgttccaagagctgattcactaacttgtatgttcgtcctgataagcctttggtgtggtttatcaactgctcatgcctgcataaagcggaaacaagattagattgtagaatacgaatgatatcatagatttaagcttattctacttacacgttgggctgagtaggctccatgattacagttcctgactcagaatcaatcttggcatcaagctttgaggtgcggattaggttcacaatccatctctcggcctcctcatagttcagattcaatttttcagcaagtaccctgacaagggaaatataggctcgacatgagtacaaagttaaaccacaagaccgcaacaattcttctcaacttaaatagctggatatggcaattttcatgtgttgggaaagataaggaatagagaaaattccaaacattgagcaatccggagagcagagttatgtgtaaacatatacaaccaaatgtgagaacttaccccatgtcaatcctttgatgaattttgcaataggtttcaaagacgaataggcgggcattttcaagaaattcatctctcagtggtacagttgaaaagtttccatcctcaactcgcttgccaaggaatggatcattcacaatgacctacatcatgttaaaatgtcagagtattgattgcacagttctgcacaaacaaaaatatctatacatgtggatgagttacctcttcacactctttcatcttcttttgagccccatcaaagtcataattgacaaacacacatgccaggaactcgataattggatctttgtaggagtagtgctcttgctgaatgaccttaatgaattctttcaattgtggtcttctccttttgttgacaatgaaagcagttgccaagtagcgcagcaagtgtggagcactagtttggatggcattcagatacctgaaaaagtaaatcaaattagtatacagaactgcagcatgaaaacaaagtgaattatttttcagcaaatgcccatacacaaagcacaatcttaagaataggtctggatgaaaagaaggagaagactctaaaactagtgactgctaattacttgtaggcacatcaggactaacattaactataaacaaagttctacacacaaacaccacctatacataacttcatcgcatctagatcatgcttatcttaaaacgcaaggaaatagatggtgatgaaaggtataaagaagagatgcagataacagagaggtagaggcttacttgtcttggttaaaaagatcaatgatctgtgtccttccattatcatggttaaaaaagatatacagaccccaatgcatcaaccaaatcctgttctgcacctggtttaacggcgatgaaaaactctgaaaaaacaaatggtagttagcatatatactctcacatctatattgatttcaaaggtcgcaaactagaagaagttttaaatactaacctttgagtcaataatctctttgagacggttaagctcttcaagagcaatatcccagttttgcatcaatatttcagatgcgagctttccccacaaggcactcaaactcctctcaaggttagagcacagggtcctgtactggtaaagataatcagcagcaccagaatagttgccacattcaaactgaaacttggcgtactggtacaaagcctcaatctggtctggaccaatctgataagacaccaagccatataagatttgtgttccacaatacacaaacaaaaccaaatctggataacatttcacaaaattaaacaacttaatcatccaaatcacaacctggtagcgttccttgagcatttggagattgtactgcttgtcagctcttagctcctgcacagcgttagggttcaaaagaaaagacacgagtggtgcagcagcctcctccaaagatttgagcctagcgacaacctctgttcttctctccaccatttctatcaccacaaatttcaacattcatcatcaaacaaacaaaccagtacacaaaaacgcaaattcacagacatatccagagaggaatacacaagaataccttgaggagcgtcttcagtgtggtagagactcttgtgaatatccatggcgtaatcaaccatgttcgtctggttcaaaagctggattttagacttcaggatctgctcatcagggtaaagctgacgctcttgaaggaactcgaatataggaaacaccaagtgtctgtccaggttaggcgctattagtggcgtcaggtcatagttctgtttgctttcctccatcgtcgctaatctctcaatctccgccgcttcccgcactggcaaaatcttcttaagacggcagagatgaagtttcagagacgacgaggtaaaaaatcctgtatattgaaattagggttttctcgaatatgagctttcaatatttataaattcgcccctttacttcttatatattgttgtttaccccacaaggtatttttatctccaaaacgataacttagccgtcgttatctgatcggccggtaccggaggggttaagaaaaaataataattaaatgttttttgtggagaggcgcacggtaagaagctttattcgtttggcgtatgttagtagtctggacttctttctgtaccgcctgtgtccactaacttgcgcatgttcgtctttaacctttcgccctcttcctctatcatactggattagggttcttcttcgagacgaactctttttctttctcgtgacgaatgtttctgtctagaagcttttaaggattaagactctccaaaattttgacgccgtgttattctcttcccgtctctcatggatccttcaagacgaccaccgaaggactctccttacgcgaatctattcgatctcgaggtctgttaggtctcaatttttttgtgatttccttgaaattgatggtttgtacttgttggatgatgatcatgtgactgtgatgaatgtagttttggtgattggaaatcttgcaattgtatagcttctccttgtttctacagtgtgtttttgttttactgttgaaattcagtgtgggttttgtggctaaattcttcattcttgcagccgttgatgaagtttagaattccgaaacctgaagatgaagttgattattatgggagtagtagccaggatgaaagtagaagcactcaaggtacagtttttaattggttttatggaattacttttgccacctactgtgatagttttaagtgacgtttatctgtgttctgtctatatggttggtaatggttaaaggtggggtagtggcaaactacagcaatgggtctaaatcgagaatgaatgcgagctccaagaagagaaagcggtggacagaagctgaggatgcagaggacgatgatgatctctacaatcaacatgttactgaggagcactaccgatcaatgcttggggagcatgtacaaaaattcaaaaataggtccaaggagactcaagggaatcctcctcatctgatgggttttccggtgctaaagagcaatgtgggcagttacagaggtaggaaaccagggaatgattaccatgggaggttctatgacatggacaactctccaaattttgcagctgatgtgaccccacataggcgaggaagctaccatgatcgtgatattacacccaagtatgttgatcatatgttttttcatgttccatgggatccgtgtaaccctgtgtaatccgcttagataacttacggtgttgggtttcctagattgacacgttgaattttgcatcatttgcaggatagcatatgaaccttcgtatttggacattggtgatggtgtcatctacaaaatccccccaagttatgacaagctggtggcatcattaaacttaccgagcttttcagacattcatgtggaagaattttacttgaaaggaactctggatctgagatcattagcagaactgatggcaagtgataaaaggtctggagtaagaagccgtaatggaatgggtgagcctcgacctcaatatgaatctcttcaagctagaatgaaggccctgtcaccttcaaactccaccccaaattttagcctcaaggtgtcagaagctgcaatgaattctgccattccagaaggatctgctggaagtactgcacggacaattctgtctgagggtggtgttttacaggtccattacgtgaagattctggagaagggggatacatacgaggtttggattctgtggcagtattttatgaatcatagttttgaatccttcatggctcattcatggctcattcatggctttattaacaacattatctttttgttccgacattgttttatgtatcctttcttcagattgttaaacgaagtctaccgaagaagctgaaagcaaagaatgatcctgcagtcattgagaaaacagaaagggataaaattagaaaagcctggatcaatattgtcagaagagatatagcaaaacaccatagaattttcactacttttcatcgtaaactatcaattgatgccaagaggtttgcagatggttgccaaagagaggtaattgaaattgactctcatattagtctttattatatttcctttcctagacggatattctctttcctttcattttagattttttttggtcatctggtagaaattttataaaagaagaaccaaattacatgtcggcgattaacaacataatcccgaaaactaagttgttaatcgcggacttagatttcatttttgattagatctctcatttgattactttgagttcacaggtgagaatgaaggtgggtagatcatacaaaatcccaagaactgcaccaattcgcactaggaagatatccagagacatgctgctattctggaagcgatatgacaagcagatggtacaatttctattctccttttgactttgtagtataccagcctgccaactagattgggttacagattctgttgccaatttttttaataatacatgctttttgcacgggtttatttgccttttctcatagaataaggacttgaacaatagtcacaactctataaacttggctatagaaatggatgaaattatgttgtagacttggaattttttaatatcattcttcagctgatgctcttttgaacggtgcacttggaataatttgataatgttgacaggcagaagagaggaaaaagcaagaaaaggaagctgcagaggcttttaaacgtgaacaggagcagcgagagtcaaaaaggcagcaacaaaggctcaatttccttattaaacagactgagctttacagtcacttcatgcaaaacaagaccgattcgaatccttccgaagccttaccaataggtgatgaaaatccgattgacgaagtgctcccagaaacttcagcggcagaaccttctgaggtagaggatcctgaagaggctgaactgaaggaaaaggtcttgagagctgcccaagatgcggtgtctaagcagaagcaaataacagatgcatttgacactgaatatatgaagctacgccaaacttctgaaatggaaggtcctttaaatgatatatcagtttctggctcgagcaatatagatttgcataacccgtgagtttgtgttcttgtctccatcccttgtctttgcgattttagtctatcaagccaattaaatctctctacttgcagatctacaatgcctgttacatcaacagttcagactccagagttatttaaaggaacccttaaagaataccaaatgaaaggccttcagtggctagtcaattgttatgagcaggttcactcaatctctgtttacatttgttatttttgttctgtaggacttaatggaggaaattcttcccctcagaaatcatctttcagaatgggtctgtactaagattattgtttgctatactccagggtttgaatggcatacttgctgatgaaatgggcttgggtaagactattcaagctatggcgttcttggcacatttggctgaggtaaatagtgttgtttgacctttatatttgttgtgatttggttatgttaacctcatcagttttctcacacaggaaaagaacatttggggtccatttcttgttgttgcccctgcctctgttcttaacaattgggctgatgaaatcagtcgtttctgtcctgacttgaaaactcttccatattggggaggattacaagaacgaacaattttaagaaagaatatcaatcccaagcgtatgtaccgaaggtaacggctatgtgatatttttgaggtgacaaatttctcaatgctgtctgcatatcgtataattaggtgtaatgtttttttccacttggatcatctctttcgatccttgggctgtacgtcaaatatgcatttgcaaaagagcatgcaatgttgttaggtttcagacattaagtgatatgtactgccagtattgccccatctgtgtctaattttacatgttatcgctctagaggaaaccatgtctattgttagaattcatgttatttaattgatggttctctcaaaggctgcacgatcaatgaaacttctttgcccttttctaaaggttctctgttgacccccacccccctctttttttccagggatgctggctttcatattttgattactagctatcagctattagtcactgatgaaaagtattttcgccgggtgaagtggcaatatatggtgctagatgaggcccaagcaatcaagagttcctccaggttcgtactttttctcttgaggtctgttgaatttccagtgtttgatggtgccatgcaagagaatgttactttttgtaatttccttgtagatcacttgaaatgctgaattctcatgcaagtcccatttcctttttttgacagtataagatggaaaacccttcttagttttaactgtcggaaccgattgcttctgactggtactccaattcagaacaacatggcagagttatgggccctgctgcatttcatcatgccaatgttgtttgacaaccatgatcaatttaatgaatggttctcaaaagggttagtactatttttctgctttaattgccatgtaaaagtatgtaatcaataatctaggaagttgtttctgatacatgatccatattgattaacagaattgagaatcatgctgaacacggaggcactttaaatgagcaccagcttaacagactggtgagatttcattttctgattgcagcattattgtggcgactcttcaagttcttttagtttctgtctgcttctgtcttttagtttgctagcctccttaattagggtctcgcattactttccattttcactgcatgattccgtcttgagacttttagaaaacgacattgatttttatataactacattcatgtatatgcatatgtcatggacgagaatctcccaagttaatcaacaatggtcactcctagtcctggggttctcgtttttgttttgtttataacagccaatcttctgtcctttcctttgctgttagaaggacttgttaattccatttagccatttctccaggaactcttcaaatttctactgcatatgcatcttcttacgagttaaagttgtttagtcactcacattttgtttcttttctcaaacagcatgcgatcttgaaaccgttcatgcttcgacgggtaaaaaaggatgtggtttctgagctaactacaaagacggaagttacagtacactgcaagctcagttctcgacaacaagctttttatcaggctattaagaacaaaatttctctggctgagttgtttgatagcaaccgcggacaatttactgataagaaagtattgaatttaatgaatattgtcattcaactaaggaaggtaagctctcttgtctagtcgggttaacttccctgctttcttttacataaaggtatatctacctctcaaacaacatatatgagaagacatccagcgtttctggtgtcaggtttgacaagtctatggcttatgctagtacatgtttgtgtttctgatgccaggtttgcaaccatccagagttgttcgaaaggaatgaagggagctcgtatctctactttggagtgacttccaattctcttttgccccatccctttggtgagctagaggatgtacattattctggtggtcaaaatccgataatatacaaggtgcaattcaatataataataaaaaagtgttgaagtagagatatcctctagttttcactgaattctgcctttgggttcgatcttttgattctctttcagatacctaagctactacaccaagaggtgctccaaaattctgaaacattttgttcttctgtcgggcgtggcatctcaagagaatcttttctgaagcattttaatatatattcacctgagtatattcttaagtcaatattcccatctgatagtggggtagatcaagtggttagtggaagtggagcatttggcttttcacgcttgatggatctatcaccatcagaagttggatatctggctctgtgttctgttgcagaaaggctattattttctatactgaggtgggagcggcaatttttggatgaattagttaactctcttatggagtccaaggatggtgatcttagtgacaataacatcgagagagttaaaaccaaagctgtcacaagaatgttgctgatgccatcaaaagttgaaacgaattttcagaaaaggagactaagcacagggcctacccgtccttcatttgaagcgctagtgatctctcatcaggataggtttctttcaagtatcaaactcctgcattctgcatatacttatatcccaaaagccagagctccacctgtatgatttctttgaatttttaagttgttgactaataacctggatagttccgtaccaagtcttctcaaccatgctctatttgaactttcatgtgtcaggtaagcattcattgctcggacagaaattcggcatacagagttacagaagaattacatcaaccatggcttaagagactattaatcggttttgcacgaacgtcagaagctaatggacccaggaagcctaacagctttccacatcctttaatccaagaaattgattcagaacttccagttgtgcagcctgcgcttcaactgacacacagaatatttggttcttgccctccaatgcaaagttttgacccagcaaagttgctcacggtagtttcttttctgttgcaacttccttttaaatttagttgctttaatatgagcccatgtttctaatcacaaatttggattgtaggactctgggaagctgcagacacttgatatattattgaagcggcttcgagctggaaatcacagggtgctcctgtttgcacaaatgacaaagatgctgaacattctcgaggtagtatctagacacaagtctttgacctcactgtacaaatgaatttgtaattacatataacaagcatccctatctacacctttgctttacatttcttttattttatgtttatgcaggattatatgaactatagaaagtacaagtacctcaggcttgatggatcctccaccatcatggatcgccgagatatggttagggattttcagcataggtaggatttaactttctcaagcttttttttttacgttcccatgaggctttctgtgcacaattgtaaaccatatatggttgcaggagcgatatttttgtattcttgctgagcaccagagctggaggacttggtatcaacttgacggctgcagacactgtcattttctatgaaagtgattggaatcccaccttggatttacaagctatggacagggctcatcgtcttggacagacaaaagatgtcagtgattattctctgcttttattattctaatcgctttcatttcccaaaaaaaaactgtgcattgagaaccaatttctttgttgcttccttatataaccaaagcttcatacaagtgaacaagcatctgccaatggggttattttcctgatcttttttttctgaaatgaaacctcttaataggttactgtttatcgtctcatctgtaaggagacggtggaagagaaaattttgcacagggcaagtcagaaaaatacagttcaacagcttgttatgactggagggcatgttcagggtgatgattttcttggagctgcggatgtggtatctctgctaatggatgatgcggaggcagcacaactggagcagaaattcagagaactaccattacaggtggggacgacatgcttcttacatttaatatttcacgaacttagaattctgccactcataaattctttacatcatccaggtaaaggacaggcagaagaaaaagacgaaacgtatcagaatagatgctgaaggagatgcaactttggaagagttagaagatgttgaccgacaggataacggacaggaacctttggaagaaccggaaaagccaaaatccagtaataaaaaggtatattatgctacaaactcactcttttcttttacctttctcattaccaaaagtctgtatcaatattcgttcggttcatgatctatgcactatacaaggcctagctagctgcaaataaaacttgagttggtctacttatggagcttgtcttggtgctaaattgataacttctggcttgagtatatatactaaaagcatatggttatgtatggtgatttgcagaggagagctgcttcaaatccgaaagctagagctcctcagaaagcaaaggaagaagcaaatggtgaagatactcctcagaggacaaaaagggtaaagagacaaacaaagagcataaacgaaagtcttgaacctgtattctctgcctctgtaacagaatcaaataaaggattcgatccaagtagctccgctaactaatccgaagatgattagagcttcaatagatattttaacttcttcaggcaggttttagacaattggttcctagtttttgagccaagtgtacagatttgactcagttttctttaacgtacatcggtcctgagtagaacttaattggtacatatatgtataaatattattagtgtcgatttaacgatatcaatcattcatcaccatcttatttagtggatgctatattaattttatatcatatgaagaatttttcacagtctatctggattcatctgtcgttatttgtgatttatctttattttgattgatgcagatttcattgttggtaaaatcatctaagcgtgatcatttactaaaattattgattaaaatctagcgattcttataatattggtagcctgattacttatccactaaattttcccaaaacaaatttataagaaaaacggatatataatagaatcagtctgaacatggagataataaattcccaatcatcatcattattacataagattttgatatatatgatcaatcactattcactaagattgaatgttttgagtttcaacatttagggtaaagaataccacaagccgctagaagtttgtgagcattttgagggatgacatagtgaccaaacgttggagactttatgtaaccacaaagacaagactgctgctctttcagcatctcgcaacaatatgccggtggctgacttcctttgagtatcgccggcaggcatgacatgaggtttgtcacgatgcatgccgctttctcctctataccccaacctccaaccacagttgctctggttggagccagaggtgacatgacgatcataacagatgccacgaataataatttcgtgaacttcatgcctattagctagttttcctctctaattgtatttatttataaaaattatttgagatttggtttataagtacgataaaactatcacgtactgtatactcattttaaatggtgttgagaaattttgtaacaagttctagaataattagaattgaaaatatttactagaaacacaatcaaatgatatactagtactatacgtgtaacgtgtgtggatttttaccataatagtatacttgcaaatttgatatgaaagtcagacttgcagaaattcaaagatttgaaatttaagtaagaagatttggtattgataaagtaaatggaaattttgaattctatataaaagctacaaaagtacaaattagaaaaagaaatgaaaattgaaaggtttacagatattgatcaagatatgcaacttaaaagatggtagataatgaggcttgttgacttgttgtgaatatgatatgtttcgtaacaaaaaaaaagaaactaaaaagaaaataaaacatttacaaatttatatatctatatctaaaaagatttaatttttgaaccatgacataataaacctcaatattcatcattatatgttataaatatttgaatttttaacaaagacgattaggaataccacaagactttaacactctgcaaatatctttgtggtagtcaggactaattaagaaatcacgttgtgggtctttcatcgtcatgcaacaatctgctgctggctgtttatttgcaaacaacgccacccagcatgtggagaacacttttatgacactgtaacctgtcttcatccgagattggttttgctatggtcggaactagagatggcatgataaccgtcacgaatacgattgcgatgaacactaatgatgtcaaactttatgtttttgaaaccctaacgaccacttggcctatttcaattccttcaaagaaaatatttgagattttgggttttgagggatggtaaaagctataatagatggggtttaaatgaatactgtatttttttcattatgttgactaaaatttaatacaattatatcatcaacgtgatttatattgtttttgttattcatacgattttgacatatgtgtatgcatatttagatggcgacacatattagcaacttgttagaaaataataaatctctggacacatttaaatccattatagaaaacaatccaagacaaacaaatatttctctgttattcggtcacatccgcatagatatggaaaaagacttgaaattgaaaaagcataccaagtgatagataataaacgaatgaggcaatgactaaaactagaattgattccacgtacataatctcccaattcatgtgttacatggtaggagcgataggctaaacattatgaatgattatttccattgtataatatgcttttcgacatataataaaccatgacataatgaaacctcaaccatcctcactgtatccatcatgtgttaaaacaaaattgtacataagtaataaccaattttattttaactattcgggaagagaggtttatgatttgagcggaagctgctgagagaggaaaatcatggaggatcatcatcatcttcccgagaatttgaaacccttctttcacagagccactgaagctcaggttcttctctaattatctatccattaacatatatatctattgatctgggattactgttgaatctgggatttttgatctcattcaatgttattatgatgcgattaatctctcagttcgtgtttttatttggcaggagcgattggctaagcttgaagctgctcttgcgtcgaccaagacaggtttttttttttctacaggaccaataatctctgagttctttagactttagtcttgaagttatatgtattctttgttatcagacattccggatgctaaacttgtggaggaaaacaaacaacttcagtcaaagctcgaagaagctaacgccactgtgaagcaagaacagactaaggtattcctctttctcttcacatttttctcatcgccttagtttttgagtatggatttctactactctaggtgaaggacttgaccattgaaaacgccaagcataagtaccgtatattgcatcttgtgcgggctctaaaggatgctgatcagaagcttgagaggctctctaaatgatttcattcttctgtctcttttttttattccttctctttgacattcccttactgaggaaatgttatccttctttaactgacaagatatcataatggattgattgtttgctactcctatcttattgtgtgtgtatgtgtgtgtgtgttttgagtttcataagcaaatctgtagtttatagataagcaatgtccatacatgtgatcctgaggaagagtagattagcttacaccacattgttaatgagcttaggaacagcattggctattcaagtaggatcattcttcttgtgcttactgcatttactgtggttttgctctgaccttaagtcattggtcattttagtcactttgctggtatctttgagtagctcagaatctgcctgccatcatcaggcctagatttctgctgcttcttctttattgagttttgcacttgttacatttaacaaggcgttgctttgtagccatacgcaatgatggctcgagaagcaaggtctaatttcagcttcatggtaaagaggttctttagcagcaatggtttcatccttcaatctctctgcatattcttttgtgaccaaactcataagaacctcttttcagctacagggagcatttgccttttttcccctttcgattttgaaaccaaaagtctcataagcaaatgattatgtgcaacacaacggacagtttgatcaatgcctttctgtattgctcttgtttacgactgatgtttctgaagctttactgaatgttaccatgagaagtttgtaaccaagtccaaaatacgattttaaaattcttcataaaccaaagattgggtcaagtggaaactcagttgacaaaatatatcaaacccacacccaaaatagaaaaaatccagcaacgattttatacaatttgagatcagatcattagcccggagttgaagaaggaaggaaaaaaaatcaaatataaaatggacgttgcgttactagatggtgggttaggcagagtcagatggaccagaaggaagcagctcatagccatcgtgatgacggttagactcaaccggtatgcatttaagaccaacggctagaatcatgcttacggaaccaatcaaaatgcagagtagccaatgttgccagctcaaaggaacagtgcttgcaaatgctccaaggaactcaacaatgatcacttggaatccaactgttgcagtcattacagcaacaaacacccaactcttgaacattccttcgaacacatttatcttctctatctctctgctgtttacttcattaaacacctgttttgtgcaaagcattagtgtttaatttcatttaaacttttttatggtgaatgtttgttcttacctggcaaaagacgaaagagttgaagataattgtgttgagaacaattgttgaatctgggccattaaggttgagtatttgtttgccagcaaagttgaggatgccgagaacgattaactgataaatgctttgaccaatgatgtttctccacatagctctggtgatgaagcttgctgttctaccgattggttggcgtttcattaaaccttcgttgggaggttcggtcgctagagccaatgcaccaagtgtgtccatgatcatgttcacccaaagcagttgcactgcggtgagtggcgcagatcctgaaaaggtgcaaaacaatcattactgaaactgttattcaaaaatcattggtgaaaattgtgcatgtgtttgattttacttaccagtgatgcaagcagagacaaagttgatgatcagagcaacaacattaacagttagctggaactgaacaaacttctggatgttgatatacacagcacgtccccattttgccacattcactattgttgcaaagttgtcgtccattatgataacatcagcattctctttcgcaacctgtgtgttgtatacgcgggagtttttaacatagagaacatcgattttacaatgatttaataactcagtaacagaggagaaccaaaggctacctctgttccagctattcccatggcaagtccaatgtcagcctcatgcaatgcaggagcatcatttgttccatccccagtcactgcaactacctctcccattttcctcaagttgttgactaatgtatgtttgtccaatggcaaagaccgagccatcacctgaaattagttataacgaatactataagatgctttgaaacatttgaagaatccattgtaataatctaaatcagaacctggattttcggtagaatggccctcatttcatgtggaggcaaattacggaagtctgaaccttctatagctacacctcctgctgtaagtataccacattcctttgcaatcgctttggcagtgctaatgttatcaccagtgaccatacgaacagtgattccagcagcttgacaagtctgaacggcttccctaacaccaggccgaaccgggtccttgattccaacaactgctaccaatgtgtagccaccattaggaagatcccctctgggagcttcatcaagatccgtgtaaactaagcagagagtcctaagagcctctgaagcaaatccctctatgacatcagagatacttgcaatcttttcttcagataaaggaacagattctccgtttgaatccacaaccttctcacacattttcaagactatttcagatgcacctttgcagaaagcacgtactttaccacctgaatgagatgtaagaacagacattttcttcttgtctgagttgaatggctcgatcttgagtatcttatgttctcggcgttgcgtgtcaacgtcaccacccaaaagcaaaccaaattccagtatcgccctttctgtaggtgaacccaggatctgagtttttccttccttatccttaacaacttcagaaccagtgttctgaaatatggcctgtataaggatattcttaacttgttcggataggttcaactggaagttttcctcttgcctctctttgatattttcacatatccaaactttgttgactaccatgtggttagtggttaaggtccctgttttatccgtgcagatgcaggtagaagaacccatcgtctcacatgcagccagatgccttacaagtgccctatcactcattaattgcttcatagcaaatgctagacttaaggtcacagccaaaggtaacccttcaggtacagcaacgactataatggtaacagcaattgcaaagtagtcaagcaatgttagtgcatcttcagaagaccactcagtgatgctaccagccgtggctttctccacaacgaaccttatgcacaacaccacaaacgtaagcactgcaaagcctaaaccaatcttacctatgattgttgcaacaccatttagtttcacctgcagaggggtctcatcctctccaccctcactcagagtatccatcaactttccccactcagtcctcataccaacggttgtcaccagcatttttgcagagccgttttggactttggttcctgaaagcagaaacggcttctctttattcacatgtgatggttcactctcgcccgataagcttgactcgtctatctccagattgtatccggatataaaaatcccatcagctggaacttgatccccaatagataaatggaccacatctccaacaaccaagtcatggatggagacctcttgtctgctgccatccctggtgacttgaataataatcttctttttctctcgatccaaatctctgaactgcaaagattgcttgtagtcactgatagcagtaaccatgaccaccaagattatactaagcaagatccccgtcccatcatacatgccctttggaaaaccttctgttgcaactcccactcctattgatactacagcgcagaccataaggatgataagggtaatgtcttgaagcgcttcccaaacaaacgttaaaaatgatctggctggtttctcagtataacggttttctccatagattttttctctgatgtgtagttcactcgaacgtacaccttcagcgagagatacagatactttctgagcgattccttcaggtcctccgatttttgtaaggctctttgtgtcatgattgcgaaccatagaagcaagctcatctgcttcgacataaaatcctgcttttttgacctcatcagtgagtttatattcagggcgggcaccagctgaagatataaacaatgaaaagaaaaaagaattaaacccagtcggccaccaatgatgcatctctgaaactcaacaatgtgtttcttaccatcaataaactgaaaagctgccttttgaacatagaagacaacccttatcttttcctgataatgatataaagaaaaagtgagctcatagaagaactacaacaactaaatcattagtcactacaagaaataactaacatccattgatcttttccagactaaataacagcatcaaaacatgccaaccgctacaaaattttgattttattatttctttgcattatgcttttcatgcagaggaggatataatcattctgaaacaccagctacttgttgttgtatgtccaaagtttcagtgatcaaacaagatataaccgtagctaacgtagtaaaatttgtatttacctaagaagctaatatactcaatgaaactggtaatgtcttttgcctcacaaattacgttttgaaaattgagttaaagcaggcaagattgtatttgtatttgctcaataatggtcatttgtcaaggcataatagtcaaacagtctactgatttgttcagtggttaggtttttaaaaaaaaaaaaaaagatgaaaatgcttcgatttcaatacgaaagaaaaagaaagaccaaaacagagaagaacgggaccaaaagactttaaattcaaagagagagattcccatatttttatccacgcaagcaagtggacaaataaagttgatgtctctgtttgagaacgatatggatccgctccacgaaatttcctagaaactacgtaaaagcaaaggtaattgcacaacaagtcaaaaataacgccagactcaaaaaaagtcaacacctatatatgaatattgtagaccatatcgttcttaattagattacagtttgatttaacgtccagaaaatggattaattttcctcgagcttataatataaaaaaaacgtgcatcgatggaattataatgggagacacgaaagcatgacataaaaaatgatgtcaattctctctagtaagtttgttggcaattaaatagccgtagtaaataactaatccgttacgcatttcgatcatactcaatatttcaacattctaaatcaatcttaaagactcactcaacactaaatttacgcgtcattttgcgtttggttgactgtacattagaagaagaagaaacataaaactaattaacaatagcaaacaaacacatggattcatcaatggcaaaaaagttcctaaatagaaggatcgtgatctgatagcgtaaaaggaaatgatcgaaaactgtagtcgagatgagtaaattaactgaaacagagaaaagtgatggaaggaggaaacaacagacctggatctggcatctcttcttctcattctcagcgagtttgtcgagattactgatcatacggaaacgacgagcccgattttttacgagtcccacggaggatcgccatcgttgacgagcttccagcgacggattcttagatgcgacctcgaaatcctttagtagattagacattactttcaaaaaatctctctctccgtttacttttctcttaaaaaacagagaataataatcttcgccggcgcgaaggaaggtgaagagagagagaggagagtgaaggctccttcgtcctctattctctgtcaaacgtgggagtttgttgttgtgtgtgaggttgctgagcaatttttatgtagtgttacaaaactccaaacccggtttactcgggttatcgggccgggccgccttttcgcatctgttggttcgttttttgattattttgacgcaatccaactttgaagaaagtcttgtcttgcgtcctcttttcgtgggttttcgtatgtacgtattgttttgttgttgtggtatttaagagaatttaatccatgttcaaagatccgacccgataaatctgcctaattttattaggttttgttgtatcaagttttctataaataaatataccttttgatatatttttctgtatttctgtttttcgtaatttttatgtagtgttactaattcgcagagcatgtgacattaattacaagattgtaaatactatactaatcgcagaattacacatatatttcaatgaaacggtatttttagcatgtatgattaatgttcttagctacttttttcctacataattttgtgtttatttacctaagtttatgctctcttcatttccatgcaaatgttacatgtattttacaattagtgttacatgactgttaatgttatagttgtttctgtaatgttaatcaaatttacaaatatagcaatgttataaatatgtagaggtagaccgggatttttcgttgcagttgtaacaaaagattaacgaaatctagtgtctaatctgaaaagattataagacataatcttataaagtatttaacaaaaaaaacactaacaataaaacgtataaagtatgtacatcgttgattcgaatgtgcgtggatccacaaatagcaaaagccatccaagttgctctgttttaaggtatcgccactttatgaggctgcgctgccttctaatagtattaattaatcccattatcaactcttaataatattaattattacacctttcctcaccaaatattcaaagactttttgtttctttgtatgcaaatccattttaaaatgatttatttgctattaaacaaatgctagatagccaaaaaaaacattgttgagagcctttaatctattggtttactattcggaaaagtttaaacctagctttatgtataaatgcggtttaaacaagttgaccaaaaagaatacatgttgatcacaaatctggtagcctttaaagaattcacattaagaagaattatagatccatacagacacatctttagacttgtgaacaatcatgctcttatatataataaactatagagaattcagaaagctggtcaattataacacatacttttttttttttgatcaaccgagtataacatatacatatatgacgttatatgatgtgaacttaaattattaatgtaataaaaggttggctccatggtcagaaacatgcatttaatatattaatagggaatccctagctgcccattggcttcacttgtcacccatgtttgacccagtgtctcctcatgagcaaaagtctttatttaacaacaaggaaaactataagccaagtcttaatattacaagaatagaaactagccttttaattttatgggttttccagcccacaaacaaaaaaaaaaacctcaccactctattcataatttaaaaaacgcaatcgtgattagttgtttgttagtgtttaacagttgacacaatcaagaagcacaacgttatttaggtagcattctaacaattcttttacgttgacaactatttcataaccatttataagataatacatatttctgtccagatgtgcggatttcgaaaatgaatatgaagatatcaaatgttagcgcaaaataactaatgaaagatgaaacaatctttctacttctcatctgagtcatggcattaaattctctaagcagattatgatcatttcactacattatgattgcagaaggaaaaaaaatgagaagaagataagagcacatggagtaaacaactcacagctttaaagactctcaagcttgtgtactattgatcttgggccttcttgatacaatatagtacataagaaagttggttaggtcttcaatagtcccacttgatattaagtaattacttcaatgcatcttgtaggtaaggaatgatgaaacctaaaactacctaatgacttatcatacaaattaccaacagagtgtagactatacagctttaagacaaaagttttgctaatgacctagaatctgaaagatgcattagggctcgtcaagacctcatctctccacaacaatcgatttgtaacaatttcccataaattactgaaccgaatcgggaccggtttgattatatgcattaacaagtttgtaaccggaacaaaaccagaccaaattgctcaaacaattttccagaaccggaactagtatttgtcgtttacgtcgtaccgacattggtacgctaatcccagatttaatcggaattgtgtcttatctctctaacaacaaaattgttgttaccttcccattagtcatcttgtaaattcttcgaatctgaaatccgatcggtgagcagaaaccctaatttcgtacagtctcatgattgagatttgcgtcttctacactctctgttttcactcctcctgattcttctctcaatctcttgttttctagggctcgcttgttctgatttcgtgagggtgaacatggatggaaacaaagacgatgcgttgaagtgcttgaaaatctgcaaaagtgctatggaagctggagatcgacctcgcgctttgaaattcctggctaaagctcgtcgtcttgatccaaatctcccgatcgatgatctcgtatctgagcttaacaacaacaaatcagacgaaccaggatctgcaaaatcgcctggatctgcagcagcaaaggattcttccaattcttcagatcggccttctttacgtcaacgtggatcgtcaacaacgtcatcgtcttcttcgatgtcctacactgaagaacagatctcaatcgtgagaaagataaaatctaaaaaggattattacgagatcttaggtcttgaatccaactgttcagtggatgatgtgagaaaagcttaccggaaactctcattgaaagttcatccagataagaatcaagctcctggttcagaagaagctttcaaatccgtctccaaggcatttcaatgcttgagcaatgacgaagctaggaaaaaatacgatgtaagtggctccgatgaaccaatctatcaaccacgtcgatctgctagaagtaatggattcaatggtggatactattacgaagacgaattcgatcccaacgagattttccgaagcttcttcggtggaggaggattcggtggtggaggaatgcctcctgcgactgctcaattccgatcatttaatttcggagctactcgtcagagaacagctaataacaatcaagcacctgatgcaggtttcaatgctcgtatacttctccagcttcttcctgttgtcttcatacttctgctcaacttcatgccttcttctcaaccagtttaccaactctctgcaacttatccttaccagtacaagttcactacacagaaaggtgtcaattactttgtgaaatcgtctaaattcgagcaggattatccacgagatagcaacgatcgacacacgctggaagaacaagttgagagagattatgtgtctatacttagtcagaattgtaggtatgagatgcagaggaaacaatggggatttgttcgtgaaacgcctcattgtgacatgatgaggagatttgatacagctgctgcttgaaacaactgaagctagtaccaacaatgaggcacacattggtaatgaatcatcagcttataaaacttttataatgtcaatgccttcacgagtcaaactggtatatgtttttgttttcttttgttttggattataatgctttagaacctaacatacgatctttggattttgtgtgattatctctatgttaagattttgcttttgctaaccatgcctgtttgagcccaaaagaagaaaaaacaaaaagtgatcctcgaggttaagtaacaaaaatgggtttaacagcttcttacaagatcttttttagacaagtattcgaatttcttagattcaaaagcttcgagctatcttctcgtacaaatctcgaggccagttccgctgtgtgttgcttgcaagaaacccagcaatctgcaaaacaaattcatgattaatatccatatcatgatctctactgatcatatatatggcgcaaattgttaaagtataccttagatctcatgcccctgattgatccatcagtgtcagctacgttatccaaacaggtcagagcaaccttaagtaaatcagggacacaagtctgaaagtaagaagatgctttctggaactcatccgaggtggtgtctggttgtcttggatcgagatgaaggaatggaagtttcgcgacttctcttatggcatctagatgtttgtttagtctggccaacttgtggatcgataatattgcctcaagctctcttagtattgtttcttgttccataacaagatgtctttcctgggcactgtagtataaaagaataacacttccagtgagaacctccctattcaacaactacaaaacttaagacaagtaaatgagttagtccattgaagtatgcaatttacctgacatcagggtgatatttgtaagaattgagaatgtcattgcccgagagaacaagcccctctgttcggctttcaccatctggccttccacggacaagggagcaaatggcttcagatagacatttgtttatcgtttccaaggcagacgaaaacgcaccaactctcttctgtagttctattgactgcattaaataacaaaccgtaaaaaaaactgaaacatggtaaaagaaataaatgattgatatgtgaaagcactccaattgaacaaagaaccaacggacagtttactaaagcatgtttaaagtagttagtatatgatcaaaaagtacaaaagatacttactttgtcatataatccagcttcttgaaattgatgcgcagcttcgatcaagaactgctgcctcaattttatatcaggcagaaatcttccaagctcgccttcttcaccggaacctctagcaccaagcagaaagtgaataccatcctcttgtgacaaaatctcagtcagtagttgcttcagcatcaagttcctttgcctttgttgatcaacattacttcttccagaccaagcctgttgacccccacctactgcaatagcagcttgtgcatagtattccagcgtcatttgcagatcaccatgatgcaaatacatcgacccatattgcctaatcatgctagatgcctcggcattagcatccatcacacttagtttgcgcccagtcccagatccttcagagagaatggaatggtccactagcgatatagctacatggacagcatcaatgttatacccttcatctccagcttcgttggacatgtgcatgatcgccggtagtaactgaatgctaagaagcaaaacatatgggtataccagagggtctttcccattcttagtgtagtaagatggctcaaacttattaagataggcctggagatcatccaaactgtatggcactagcccatcattcacgatcatagatgaagatccaccagctacgtcacgtacacatgatagtttgaaccagagaaaatcttctattgtgttaaagagggtcgaaaaatctctcatgatgcgatcaatttgtcttcgggaaccagatatgatagtgtagagtagaagcttcttcttgtcatatgttgtttggccaaaccgatcacccatccttaacaatttctcacattcctcagaagcagtagcagcggtttgtgcagccacagtaccacctgttgtaatccactctgtaagctgccaaaaaaaggggacatcaaaaaggcaactccaaaacattaatgtgggttattaagaccaaacaatataccagaggagcaaactgttgttgagatgaccgagatgactgggcaatttctctagcttcctcataataaccagttctcaagcaaaaatatatctgtaatcaaagaggtatatttaatcaatctcttacgttaagaaacttgggggaacagcaataagaaaattctactgttcaacttgattgttgaggacaaactgaaaatttaaagcgtgagtgaaaatatgtgaaacctgctgccaagtagtatcaactggaggctgcctacgagcatcaactgaatcaaagtccaaactcccataatctctcagacgaatctgcgcagtattgaaaaagaatcaagaaatgcaaacaaaccaatgtatatgattgccacaaaataatattcctgtgtatatatgcttcgtgttaagctttattagatctgtggcactcacccgaagaaaagcacgaattctttgcaaatttccaactgatccaccaagagcagcctagacaaagattcaaaggagaggatagaaacatgttgtgattattgacgcacttgaactcagtgaaagatcaagggcatattttcaagaaagcatccttgaagttaagaaagtaattaaaaagatgcatcaagacacatgtaacatgccttaaatagcaattccaagcaaaactaatacaaggtagaaacgagtacttgtgtaggatgacttttaattgtatccattatatgtttcccatgcccacattccaagtggcgtcttgcacctatcacgagggccatcctcttggaaacaccatgttgtactgctgactcttcacccgtcattccctgttttataaattgttaaaagccttggaaatgtaagaacagacttttaaggtgccactggtaggaaaaggaatcttccaatcaaaagatcacctgaataagctgccataatttttgcatgttgactgattttccacgagtcaaatcaatttctagactttcatatgcaccgttgaacaatgttgcaagctatacaaacacacaaataataaattagtaggaagcagagttaaacaaatgagtacaaggtcaactagttagattaatgctgaacaaaaggcacttatcataaaaaggtgaagggtttacatatatattataggtttagcttcacttctaagagcagtaacaaaagatgcagaatttttagctacaactatcaagcaggacgacattcaaatgcaccaatattatagaatttacaaggaggttttcgaaggtcatactttaaatggcaagcctcgttctcttgcagagtttagttttttcacaacctcggcatagacatatgcctttttctcatgaatgggtttgttagtcatagacacgagttccgttccaggttttgaagatacttggggactcaaaggcactagtgaaccagcatgagagcctctacttgaattgatcatcttggtcttaggtaacattgaagttttgctaaggctgtgaagaaagtcacgtttttcttttatacagtcctcctgccataaacagatttcacgttgaagtatatatgagaaagaacctgaataaattcaaaaaacatatccttctaattagcaataagcaactcaaccagcttctaactttctacgcaaagaattttcaaactacaatgccataaatatctagggataaagaacatgttcctccaattaacaattacggtctcatgcttatcatttagacatttacgagtctttgactgtaatagcataatgaaaagaagcaaaagacgagaggaaaaactttaaaaccattacaaacaggagaacattgtctaaaggcaaaagatgtgacagatgaaactaacacggaaatcaagtcaaaacaatttgtgatagtcgcaatactgacctccaacactttcaacatgtagttgttaaagcttcgaacattatctttctgggcctcctgtatagccgataccattgccatttcatgaacctaaagacaaagaagatgcatatagaacaatctgtagtgtaatcaaagaaaagggaattctcgaagagcatttagatatagaaaacctgttgcaggtattcttcaacacttgttgtctccgcagggaatacatcttcaaaagtcgtctattaacaatccaaaagaaaaacttaggcaaaggtaattcagtacacagataaaatgtcaaattatccaaagaacagaagagcaacataagctagtagatatagataggaaatagagaaaatgctcaccttcaactcaaatgacttaagatcacgagataattgatctgcattgattccctcccgtgcaagtagtctgcgtatccaagcaaaaatgaagacaccagaatcaaactatcgaccagaggattctacgatgttaagctcgtcggacctaccttcaatctcgcactccaatactctttaatggctaaattgagtgaccaatattgaattctcggggactcactaaaacgcaagacctaggtaaagaaagagaaaatcgaagttgtagtacctagtggcagcaatagactgtgaaggagcttcgtttcttagggttttagctttgagtttcctcgacaatgcttccaattgatccaaattcctctataaaccacggatatatcattacgaatcaagctcatcgtgataatagaagccaacagacaaacggaggttcgaaatcgaaaagagtggtggttagtagaaggacctgaagaggaggaaactgagaagaaggagccgcttgctccagaagcttagtcgaagaatggagaagatcagtccatccactcatctcctggtcgttcgccatacttattgagagtttgagcttcaggagaactcagcagaagaatgtcaagggtttaggattcgaacattttaaaatcagtttttttctccacttactcaaaccggtttaattggttcgggtcttgattccttatttgtcgattcggtacaataaaattcaaaaccaaaggaaaagagaaagaagacacacgacacggcacgacctatttagctgtacaccaactgttcgacgaattgcctccttgaacatctcatactttaagcttatggaggaaaaagactgggaagcttcttcttcgagcgaaaacgaaggtggttttccaaacgatgatgacgaagagtttcattctggtggttcagtgcccaagttacagttcaggtgaatttagatttacttttgcccaaatcataaactgctaagtcaactaatcttagactcagtttctctttttgttttttgtgtttgcaaaatgtagagtaggatcttccaaggctcgttggattactgaactaggaatggcggaagttgaggttaaaaggggaaaactttggacgacaactggaatcattcgtagtggaaagacatattgcttcatagaagaggctctgtatgtggcaaactaaatattttacaagttttttagatcagtctttaccaaagatctgatgaaagtctcttcctttttcgtttattcttcttccctttgcaggtatttgagtgaaattggagagttacagatcttaggtaatgaggatgacatagtgatcccattgaaggacttgtatgagaaaattgcagaggagaaaagcgttgctcttgggaaaactacgaggtttatagatacttgaagggtctaggttacatcctaggtaggcatggagtttcttggacgttaaaggatgctgcaagaccgaatggtgaagaagagtcagcttgtgctggtgaatgtcctgcagacaatgatactgtaactaaactcttgggagatatgcagatttgtgatgcaaaagcggtgtttgacgtgtatctaccaaacagccggttcaagaagtcttctcctggtgaaccaagctttgtggcttgcttctcggggtaagcgtttttgttagtttgaagttcgactatgaatgcaagtttttcactatgcgtcttactaaatatactcatattctttaacagggactctccaccaagcaaagaagatattaaagtcctgcaaaagcgcatagctgcaccattaacattctgtcatatcgctcagggccgtgccagtttcttttccttcagttctatagacctccctgtcttatcataaaatgtaacaaaaaaccggaatgatcttgtattcttttgaaaaagtcgaatcaaactgagagtttacatacacttggagtaactttgatgatgcgtattcatgaggtattatgtgtaaagggttctaggaagaatcttataagggctcaggaaaaaagaaaaagggaaagacgaaagcttctttgagtgagattgtttgtatcctcgcacataaagatctaaggagctccaaggtttttcaggtcatttgcattggcaaaccacgtgggtactattgttggcagatttggatacaagtccccgtatgttccttttatcgtgttttctgcaactccagtggcttctattagacctgcaactcattatgtgtcaatatgttagagaaagagaagagctgatcagactttgctttaagggctgctatatagattgagatttaaatgtgacctttgagcagatgcttctcataagaaagtcgagcaatgacatatacgattcctgctgcaactgatacaggagccctacggctgcaactgcaataagtagaaatatatgggttttaagtctgctgcatcatacatctgcttagagcttactcatccactaaattccaggaactgctcagataatgtaagttacccattagtcatataatcataactttccgcagcttctagagcagcttcaactgcttctttatccaatctaaatatagaacaaaaccgcttctgcagatgaatacaatgtcagtaaactagagctactgactatttgttcaatgcaacaaaagcttaatgcacaaactcactataaagttcgcagtttcgatactcatataccaatttttgttgatctccagtttctcagctatgaacccaactgtctcactaatatccgaaattgaggctttattggcaaatctagatatttctacacaaatggttttgaaaaagctgattcagctacaatggcagaagctacaccaagaaaggaacaagaatctttcaggtttcaaatatatataccacgcatagtccgagtcatatcattgtctcgacaagcaatgtagatacaagcagcaaaaaggacgtttcgttcctttcctctggcataactctccactaccttaaagatctcattagcctgaccctgcagatcaagaaacacaccaattcaaacttatctgtgtatactaagttactaactatacctccagagacgaacgaaaggcttaattaccttgattgtcgcaggaagtttcaacctgtaataatggatgaagcgatatttaaaaaacttctttgaaaaagaagcttcttgtctactaagaaaagaaaaaacggtacccattggaaatagcttcgatggagacgatggacagagctttattcggcttggtggaggccattgagaggggatcgaagctaaatttctgcaaatgtccaagatcagagaacaagaattcatcggaagaagcagtaatcgtctctgaattctgtgaagttccaagggacaagaaatcattggaggacccattcatcagcttggcggtggctatagagactggatccaagcgaggttttgacgaatttccaagattaagggacaaggaatcatcgaaagaaccattcttgtgctcggtggtgacaatggagagatcagtattgcttaaaagtgtgttcgtcggatcagggagacgaacagtatcgttctctgctacaggggaaagatctccgatcgggcgatatttaaattcaagaccacacccgaagcatcgtgtcctcctcgtaacgtgatcagtcacgacattgatctgcttacatctcctgcaactgtgaccccacttcatcgtcatcgaaaccctaattttctgtcctgattataggattcttcttctttcaatggagtcgcgtgaagattttcgagaacaagaaaatggagggaatggacagaataaacggttgattctcattttatagacaaacagaggagaagggtgagaattccgctgtggtctggtgcacgtagttgcaacagtctggaacgttgagatgaggtgtgacccattaatctttgatctgacggtctaatattgtttccagataaatacgaaaatggtttatgtgagcgtctattgataggagaagggaactttgtgccgtttcaaggccatgtcacccaaaaccagtgccgttttttggcggtttgcctgaaccaataaaggaaggagcctaaaacacatcgagttttacaacactaatgagtttcaatatgcaatctagtgcattctatttaaaaatgaaaacaaagtgctctaatttaatcatacactgtaggtttgttgataatacgaacttgttccaaaatacaaggaactttgcatagttgaatatcatcaaattcgttggatatatgatggcactagctagtatacgtttgtaaaaatatagtatccattgacaacatatgtaactcacaagccacaaagaaaacagtcaaacactatattggaaaatgttattactctgaccaaaacctttaatggattattgaatctgatcacaataatgggtaactggtaaagtggtaacacatcctcaatagtaaatatatacctttaattaggcgatggtgataggccaccagctgacaatgcccatcaatttattcgtttgcgtaaatcacgaaatcttttcttcacctttatttaaggtttccaactaaaatacttcagtacatttactatcacaaccatacgaatttaccaattaaaactacaaaaaacatgcataatacaatctgtttgatcaaaaagaaaatgcataatacaaatcagtctaacagttttaaaagatactatattaagtcgaaacaatgatttatatattttcaatttgcaatttttaattataataaccacagtttacttgggatttcatttcaactaataaagcaataattaaggaagttatctctattagactattactgaaaaagacgtgaccggaggaaaaaaaaaaaaaaaaagagtaacgcagttccttgctcttctttgacacgtctctggttgtttccatcagctgacgaaagaaacgaaactcaatgaagaaggctaaacaaaaacaaaaaaaaatatagtattttaaagaaagtcatcgaaaacaaccttcattcaatttgaaaacatcctctctctcaaaagtctctcctgctctgtttctctcttgatgtaagagaaagcaccataccccaggttttatatttagaaacaaaaacctctttctttcttctgcgatagtcagaagaacatcaaaagtcgattagaagcatctaaaaaatcaaaactttgcttgtggggtttcttcttttgttcgatagaaaatggttcaatacaaaagactaattaaaaaaggagaaaagcatagactttcggtagaagaaggtggttccggtgcctccgccgtcactgtctccggcggtgtgtactcaaagacagccaaacagaagcttctcttaactatctttctctctttgctctcatgctgttacatcttcagcttctcctctttctctcttctaggtaatatcaccttactcataatctctttcattaatttttttctagatttttctcataacttcgattgttaattttcttgtacaggtgcttttagcagagaaagtaaaggatttggtccttatgaactgttcattgcacctctttgttcaggaacctctaatggtattttatcttttcaaatctcttctttttaaatttgaacaagctctgtttaatgatgtatctcaatcacaggaacaatttgttgtgacagaaccggttctagatccgacgtttgtatcatgaaaggagacgttaggacacactctgcttcgtcatcagtcttcctcttcacttccctcaaaaacaagaccaagatcacgaaaaagatcaaaccttacacaagaaaatgggaaacaagtgtgatgcaaacagttcaagaactcaatctcgtttacagagatgaagaaaacaattctttagtcgtctcctctgttaatgacatctgcgatgtgttctataacgttcctgctgtgtttttctcaactggtggatatacaggaaatgtttaccacgaattcaacgatggaatcatccctttgttcatcacttcacatcatttcaacaagaaggttgtgtttgtgattgttgagtatcatagttggtggattatgaaatatggagatatcgtttctcagctatcagattatcctcctgtcgactttaacggcgacaagagaacacattgtttcaaggaagctattgtgggattgaagattcacgacgagttaaccgttgaatcatcgttgatgcttgggaataaaacaattcttgatttcagaaatgtgctggatcaggcttattggccacgtatccatggattgattcaagaggaagaactcaaggcagctaacaagacagaagacggtttcaagaaaccaatattggtgattctgtctagaaatggatcgagggagatactaaatgagagtcttttggttgaattagctgaggaaattggattcatcgtccatgttttgagaccggataaaacaacagagctggcaaaaatctacagatgtttgaattctagtgatgtgatgattggtgttcacggagctgcaatgacacatttacttttcttgaaaccgaaaacagtctttatacagattataccaataggaaccgaatgggctgctgagacttactatggtaaaccagctaagaagatgagattgaagtacattggttacaagattaaaccgaaagagagctctttgtacgatgaatatggcatcgatgatcccattatccgagatcctaagagttttactcaaaaaggatgggattacactaagaagatttatcttgagcgccaaaacgtgaagcttgatttgaaaagatttaggaaaccgttgtctcgtgcttatgatttctcgatgaagcgaattggactggtgtatatcagtcacaaaccggatgttaccaattaaaccggggtttgagattgtataatataattttggagatgtaaacattttgtacagagaatgcatagactttcttttgtgtcgtacctaatgacacaaatttacaagcttttgttctgtatagaaatcactaaccggagaataccaactaaactgagtttttttcacactttttccactgagttcataccacattcaactgggtctaagggcccaaatattatttgctttataggcccaaagtcccaaacatgctaatctttcatgatacctcctccatacgtcttttttacaattttgtgtgttttacaaaaaaaaattttgcttagtaatctatttgttaagattttttccgtttctatttgataagaatatattcgatatattttcaatttatactgtatagagtagcttgttataattatcatcaaatttcattgtttttttcataaacaaatatgattaaaattgatctagaagtctgcacgaagaaaagtaaaatggaaacaaattgcagatttgcatgtaattacgacaagtggctcattctcttttttagcatgttacagaagtgtctggttaatgggaaaaaaaaatattgaactttcttttattttgtatataaaccaaccttatgtgagtaatatcccaaagaggtttcttttaaaatatctttgggtttttaattcatttatgggaatttctataacaaaatttcaccacaaataaatgttgttcctttcgtagaagaaaacaaaatcttaagaaatcacgttattttcgtatttgatggtagtttataaatttcgaaagatgattcaacgcgattcatacgagatattatttttttgacaacaacaaaagatagtaaagtgttaaaaaaaaatgtgtaaagttttatggagtataatttaaagatttatcttgaattgagaatgtgtaaatcacattggttaaagtggaactaaatatttttttagtaaattatttgtttttctctagcttagttttaatttcaattttggaaaagggagaatattgaccaaaaacaaaaagagcacgattaaatgacctaacactacatttagaaacacgcatctgaattatttacattgcaaaacaaaagtgttgagctgtatagcatgtatttatatttacttaaatactttccatatctataaaaagatatttgctcaccaaaatttcacaaccgaactaattttatttattattactaatgtttagataattccacaaatacagtgtaattctcaaaatataatttcggttacaatagaaagtcttctctagaaagagatatttttcttttactaaaaatacaacaaactcagtttggaggggaaagtaatcttccttgtgagattttactatctatagaaacgttaaagccacaccttttgcttttcttatcatattcttcttcaaatacggccacgtttggccattctactagatctcaacccaaaaaaaagaaacaaaatctcaaccaacaagaaaacaaagctaaagagaaaaaaaagaacacagtagttgttatttcataaatcttttaaagatatgaaaatatcagttattaaataaaacagtatccaaaacaactaaaaataaagactataataaaatgaaatagttgatcaaatatttccttattatagggatcaactttatttgactatataaaaagtaacatttctgtaaagcaataaaacaataaaattatggaagattaagttttagaaacgtaataaaaagcatgatgacctaaaagcaaagccaaaaaagaaaaaccctagaagataaaaaaaaagggaggcgatacacgaaatagagaagagatccaaaaccaaaacaagggcgttataaatgggaagaaagttccaaaagaagaaaacagccactcacaccaagcaaagcaaattagcaaagccaccaaatatggaaaattgctacttatagtaactcccatctttttatataataccctaattttggtcctaattttccttccttagcccctttcccaatatttgatcaatttctaaagaaaaccccttcctctactagtcctcctcctatatatacaaaatcttaagaaatctctctacttgtttcctctgttatcataatctcttctctctatatctcttctcttcttcttttaccctgttttttttttcattccacagagcccaggttgattgattttgttattcagagatatggggagaggaaggattgagattaagaagattgagaatatcaacagtcgtcaagtcactttctctaagagacgaaacggtttgatcaagaaggctaaagagctttcgattctctgtgacgccgaggttgctcttatcatcttctccagcaccggcaagatttacgatttctccagcgtctggtatattagttatcatctcatgattttgcttctttttttttgctttggggaaataaaaagttttgcatttttatgggtttttgtgtctaaagtaaatgaaaacagagcaacccctgtttatctatatcctaatctggctaaatctttaggttgatgatgaaataattttgatgggttatgattttaaggtttggagaattgagattacgatttttgctatcggattagtttgtgtgttttataaaccctaactgttgatgaaactacaatttggtcactatctttggtatcagaatttgggagatgcatttgtctatgtatatatcagttgttagaatctcaactccagaattctgaaagatcgttaatttctaagattattagaccatagaagtgtttatcttatctttatgaagaaatttgagaatgcagaagtttagattcatgattttttcctgtaatgatcaatcaaaccaattacggggttttactaacggagagttttgttcaatttgtgaagtatggagcaaattctttctagatatggatacactactgcgtccactgagcataaacaacaaagagaacaccaacttctaatttgtgcttcacatggaaatgaagctgtggtaagcagagactctctaccaagaatttatttttgtatccctttgtctgtgttcaagtttttggtttaccttacatggtattcgttgttgtagttgcgaaatgatgattctatgaagggggaacttgaaagattacagcttgcaattgagtatgtatctcactggaaaaagaacttgcgtttgttcttggttaaagtttcggcctttcatcggttttttctacttgttcgtgaacaggagacttaagggtaaggagcttgaaggtatgagtttcccggatcttatttctcttgaaaaccagttgaacgagagcttgcatagtgtcaaggatcaaaaggtgaagacaaaatactaatttattcaaacatcgagagatgatttttgattcatccctgtcttgaaaagttttgttttgattcagacacaaatcctgctcaaccagattgagagatccaggatacaggtacgaacagagctcctcaaatgtcagaatcattgttattatcaattcgtatacaatgttgaatctcaacactcttgttttgtttccttgtcattaataggagaaaaaagcattggaagaaaaccaaatcttgcgcaaacaggtaaagattcatcaaaacccttatattagctcggtctggtcttcaccagtcataactgagttcaattctaatttgccctcaggttgagatgttggggagaggttcaggaccaaaagtgttgaatgaaaggcctcaagattctagcccagaagccgatcccgagagctcttcatcagaagaggatgagaatgacaacgaggagcaccattccgacacttccttgcagttggggtaaactgcaaaacaaagccctaacttctgttacaagcttttattgttactgagcattctacaaacttgttggtttgatctttcttaggttgtcgtcgacggggtattgcacaaagagaaagaagccgaagatcgaactggtctgcgataactctgggagtcaagtggcttctgattgatggaatcgattatttttctaattctggttgtttaggggtctctatgtgtcttcttgtttctggctgttcttttgctttatttcatctcaagtagagttttcttaatgtttaggtggaacatttttccataatcaagaagggatttgatcaatcaataacattagattttcttagttaaagacttaaagttgcccacacaccacaccatatgtgattatgatgaatttacattttataaacaggttttcagtgatttcaagaaacataagcgtgcattcattttttttttgctttaactagaacccaaatcttcaatagttttcatgaatcgactttgaaaatacataaatccacaacattaatatgattaagcattcttgaaatcctaagttaggtgaacagagagttaagagtaaatgctcctagacatggtttagtcgattgcagataattcgggtcagcaaagaaatgtgatcactaagcaaatctgggttgcgtaaactcgttgacaataaacggaagcgtcttaccccttttttccggcccacttctttacttgggccaaataattttattttgggctttttttaaaaggatgatcttaattgtgtgtgggcatttaagggcaccgacaattcaaaggtagccgacggcttacagaaatatggctgctcagatcatcagagaccccatacaataaatatttatgtttcgagaaataaatcaccagatggttgacaagttgcggcagtaagtacatgttacttttcttgtcagaaagtacaacaacagtactttttttatagtcgacactaaaattaagactcgtatttagtaatgcagaaaaatctttacaaaaatatactatatactcctgagaaaaagcagctgatttgactgaaataaagaaaatgttagtagtctagtaatgatttgtgaactacaaacgttgtttaaggcgtttacagtaatattaacattacggaatacaaaagggtgatgactagtcgacaaataaaaatggtaatgagtctaaatgacgaaataattaaagaaatgtgtgaaaggaagagaataataagcacaagtcccggacctgaaaacggaaagatcagaagagccacgtgtgcaggagcttgaagagaaggttccaaatgagaaagagatccaccaccgtcatcaacacacacacacacactttgtttgttctcacggagtccccaacaaaagtcaaatcaccgttcattgagccccacttttatttacttacatgtttaatagacccgtttgtattacgagacacttctagtcgcatgtctccaccgtccgatcacggatcctagctgtaatcaagggggcagatttaatgaagtgggcctcttagtaactgccttctccacgtatcctgacaatttattgttttcttgttagtattttgccatttttggtttattataggatgattaatgatcttataactcttccataaactaatttagatagatacgcattgcatagtttgtttttaggtcgatgaaagctaatttatactatacctttgctttgtttggttttgtgtgtcagcgttacattaacttgtctttgttttttcacattgttaacaataaactccaaaatccaaccatagcattttcgaggttatatatacttgtaatattcattaaatttcagaaattactcataaactattaagaggatgttgcttataattcaacccccatttcagtagtactcaacattcaactgcattcaactgaatcttttggcttcaattactatttccattacaattgtccaaatgtaaaacgatttttacacaaaaatcaggaaaatgatattccataatgataaaccatgatattggtaaccaataaagactagtacatgtaatcgagcttcataaatcagaatacgtaatgaaacttaaccagtcaatgtaatttttttcatacaggaaaagtagactgagaacggtcaaactttgttttctaaaaaagaaaattaggcacatccttgaaccacgtttgacaaaatctctggtttaattacacattaacacacaagtactcactctctctttaaaaggctctatacactgaatttaataaggaaggttctcacttctcatcaatatgaatttatcatttcttatatactttgcactttgcgcaataaacatgtgatcgtattcataactaaagtaaaggcaacatactaaccctctttatttaccctttttagagcttaaaatgaaaacaatctccaattattttctgtaaaatgttaactactgtaaattttgtgaatatctcagtttattttacatttatctataaatacatttgtttttatcttaatagtaaacttagattcagttacatctctagatagattggatcttttaaattcacttttaaattctcttattctgtgaaagttaaataataacttcctctttattttgatttttctcataaatttttgaagttaaattaaaaattcgacatcatggggtcgttaattaacatccccttgatttaatatccacccacattttttgtcgtccccaaaaaaataatctgacccggaaaacccgacccggctttccttttcgttgttatcataacaataaatcaaaacagaacaaataattttgatgcaaaaaaaaacaaaattcgagaagaaagccaaaaagaaaaagaagagagaatgctctcagtctcagcctctcctcaccaccactaaccccagaagaatcctcacagacagagagagagagagagaatcagaatgggtttgatatcagcgaaagagacgaagaacaacactagaggaatgggtttgctcttagtcttcttccccgaccaccacaacaacaacgacgactctccttcttcttcttcttcttctccggcaacaacaactctcttccgctccagatcttctcgtcttctcctctccaaagctcaatccacaatctcaatctgcatcctcctcctcttcctcactctcttcctcttcactctctccaccttcgaaccttcctctggctttcccgccgtttcttcttctcgtcctcaccgtcgatttctcctcaaccgcgacatctccgcctcttctgaatctcgtcgtcgttataaccgattcgctctccaaggtatgggtactctgtttctcagaggaaccaagagcatgcacgatttgattgttgttcatatctcttccgatactacggaagacgatctccgtctcttcatgcgcttgatccaccgctccggtgtcacttccaaatccgacgtcgttttactcttcaattcgggtacgagattcactgaaatgatcgaagaagagaacgactcgttcttaaaactcgttgatgttcatcggaattcgtcgaatcaaatcgactccgtttggggatttaatctcacgaaattcatgaagaagcaatcgaaatcatcatcgtctgagccaatttgggggaagaagacgcatcgagctaattacaacgatacgtcgtcgttgaataactcgaccgagtcaaccgagttgttgacacatggctcagtagtgggtttcgacgtgactgagttggatcctgaaaactcgctatccgggtttatggatcacgttccgataagtttgagaagatgggcgtgttacccaatgctgctaggtcgagtaagacgcaatttcaaacacgttatgctcgtggacgctaaaacctccttgttcctcggtgacccgctaacccggattcgtaaccggagccttgagtcagtcctcttcttctctaaacacagtagtagtagcaagaaaagctccgaggttaatccggcgattctgatcggtggagctaaaggaatcaggaggttatcgagctcgatgcacactgagatcgtgagagcgacgattcagcagcagcataagaagaagaactcggttacggaatcggtggtgttgagccaactcgttgggaatgttcacatgacgaagaattttgaagtggttacgagtgagtcggtggtaccggaagcgagttcactggctgagttaaggacgagaaactcggcggcttcgtcgataaagaatcatgatataatacaaagaggtggtggtaatagtaatagtaatcatattattgatattatggcgattattatgaaacgtatttgttcttgtgaattagattcttctgtttataattactgttagcattattttaaaagagtttacgaaacaaaaaaaatagggaaaattttaatttatttgtttgaaagttttgtacacatttgacatttgttatgttctttagatttttgatttttcacagatgtttttattagtgtgtccacgttctgtattcattattgatttggtctccttcgaaataatcatttgataaaatcagcaaaataccattattttttggattttatatagaaattgtcggtaatggaccgttttttgtattttatttattttgctagaaatctcgaaattattttcttctgggatatatataattgattctcaatatgtgtagatagataaactccacaaactttgattcctaacgatgtgggctacaaaattacaaatacctgattgtaacggaatatatatatatatgtatcttaaaaatacaatatactaaataaattgttatgatttctatgttttgtaatattttaacattttttagaaaatggtataaaaccaaaaatcttgtccgatttatagaatgaaagtcttcactaaacctaaaaaatcaggagagaatgcatagtactataatttaaaataaaactttagataacataccacgataacctatgatgactgactcgggctaattagtcagtctatgaaaggagagacgcctttagaagacaattatgatgatgctgatgatgatgatatcacatgtttcataattagaaattttaattactatatttgatttgtttttgttgttataaagacacacgtcgcatgtggtttatttggtcttttgagctggttaaagtcaatttggccaccacttttatattttgtctaacactaaaaactttagaaaacgtcgtttgttcttcaattattgaaacctattattttaacaaaacaataatgccatcacgagagattcatcgttggaatcggattccccaatcttcccaattactatcatcgaagcctcaaaggtggtggtgacataaacatacattaataaaaaagctcatcatctaataactttattcggttgaaactttttatctccactcattacagtcactagttatatagtagtatcattttcgttgttgaaagcattagttctacacttattcattgtaatggtccaattagatctaaatatataataccttcgatgttgatacttataattctttgataaaatccatcaattttcattccaaatatataaacatagaagagatttcgattctcatttttgagaacatatgttttaaagttattattgaacaaaaagaaaatgtggttatctccaaataaaatcattatagattaagcatgtaatattagtatcataatgtaaatcaataattgttttggatatagatgaagtcagtatctttgtatgtccacacacattaaaggcgtgaggttgtgaaaaagattatcaacaacaagagaaaacaaagagaaagacattaaaaaaaatacaaagtggggttctttcaaggagtagcaagttaagtctctctactacaatggcttcatttagaagccaagaattcacatttatccataacaagcgtgctttgctttttctttattttaccatctcaaccacgttaactattttactctaaagtagtctagttcattaatcaaatactgtgtattttaataatcaatcattctatatagtcgaaacattactattgtttatgtattgaaaacacttttagttgatgttggagttttctaattagctttatccatggcaagttatgtagcttccaacctttggctatttttcatatatatatatttttcttacaaaagaagaagagaaaccataactttaattatattaaaggtggcgcagccgggcctttatttgtttaatagtagaacactgacaagtgacaaaatgataaaattcatttaatgattttgtgttgtgatttcttagaaataaagttgaattttctgaaagaaatacttttatggtaatggagggtttatgttcttactacttatgtcatacgatccagcgggatgattaaaacattattccttctaaattaataacattattatgttatatactatatgcatgtttgttttatatgtgaaataaatcagtattgatcaatcacagtaataaataatcattttttaatgtctttcttttcattacataggaactttttaaaaagtattttccttaagaaacaaaagtatatttgttaatataattcattattaaaaaaagaataagctggacaaaaaggaaccgacactctttcttccacacacgtgtcgatcgataattggttatacaggattcattttccttttggagtgtggaccctctaccttagacagagagttcgtgcagagactaatatggctgctgctgacctgtctcgctcaaagcaacgtcgtcgttttaaaatttgcccagctcaaaaatttagacgtaaattccaaagattgtttttgtggtcgattcttttagatcaatgtgacgatagtgacgacgattgtaagaaaatcaatattttgaggttataagaaaaaagattttagatcaatacatgtaagttagtgaatgatttttgttagtgtactattatcagtcgggttaaatcggtatgaatatttttgtataaacgatttcgctgacagttcgataaacataagtgatgattaatgcgatcttacgttgtttatggtttattagtttagtttcttaagtttgtgcaactagtgagtagtgactataaatgcagttcgtatagtcaaaagcaaaagtcgtaaacattctcgatgtggtaacactgcataatcgcagaatgtttgcgtgtggtttattatcattattaccttgagaaatactaatgcaacatttgcgtaaccattctgattcccaactaattgtgttccttgatttgttgttgcacagtaacaaaaaatgaaaatgttaccaaatttgtgggagaccaggtcagacataaatgtggttgttgttgctctataatttcctttcttttctggtcatttcatgattctgatcaataatttaactgcatttacttcgacacacatatctgtcatgttcatgtactatggaagctttgctagcaacatacatagaactagaacaacaaaatcaaatggtgtctcaattgtcaaacgaatccaacaccaatatattgaaatttcatgagtttacatgtagacactgttcttttacacaatcaaaataatgtgcaatccagatcaaagaatttactacccaccaccacacaactgtcctgacccaaaaaatgaacgcatgtttgacaaaaaaacaatcattacaataacacaccattttgtggttaagaatatgaagaatcaaacccaaaacccacccatgagaaagaagaaatatattgaaaaaccaaaacaataaaagagtaaaattgaaggaagaaaaacacaagaaactgttcattgtcttcatagctgcggcgctgaggtcactacataaccaaataacacaatggcatgttgctcttagtatatatctgacatggaggatcatgagatctaaggatgtttgtgatgtttccacctgctaattttttttggagaatccttagaataagttgaatttcttcttcagtaagtcttgtttccatccaggcaatttgtagaatgattctttctccatcccaaatacagtcttgaactctacctcagacaggtaagcctgataaattggtttgaggaataagatactgacaacttatgctcaaattaagacgaaagaaaaagaacaaaatcggctcaattttgattcacctctctgcgtttgaagtcaatccctgtcacgggtttctcagatttggcttgtagtcgttcgtaggtgaaagttactccagttgtttctacttcagaatcatcctgctttggttttgcttcctcagcactcgcttctgctgcaggtgacacttcctcttcttccttggcttcagtagcttcttcggtagcctccacttctgagaaagctttctcatcttttgcttcagctgtaataaccacacatactcacagttattagcgtaatcaaaccaaggccaaaaaacgaaaaacaagctcacgatatttagtttaagcgctggtatcaggtgaagaactaaccagaagggctggtatcaggtgatttcttcttctcagcagtgagaacttgggaaagagcagccactgctgctgctctttgtgacgcctggcttgtcaatcctgatcttcggggaggtgactttgatgatggtgaagaattgaatgcggatgttaaggcggctaaagcttcagccctttgtcttggacccccttgacttccatttgatctgtctcggctctgcagttaaagaaatgagcgtctaagtcaacatatcaagaacatgggacactagtagctgtgatttgagaaattatttgattgcaactcaaaggtttgcgtaactctgagagattcatgaatgggaaccccagaaatgagtcccagagcctttttttttccttcatgatatgccaatatctttgtatatatatgtatccaaaaaaatctagtagaaacataaaataatgagcttaagactatttaccggagagcttgttctcccagaagaagaattaaaggcagaagtcaaggcagctaaagcagcagccctttgccttggtccttggttcccactgctagactgatcctgcagcagaaggtaaattataaaccaacgttccagggatgtaatataatatattacaaaggagaggcatcaacaacagtttcttccatcgtcacatatgttcttatctgctacgattagacacaaaagcaaggaaacataatacgcaggtatgtagtatctccaactttccccagtaagcatcataactaagtgtttacctccacaacgtggtgtgtaccaagtaataatgctgccttcttctggtaggaattcccttgcacctgtatgacaggtaaacataccaaaactaaatttaatgagacaaagaagtggaagttcacgaaaagtcaatgacaatcagagttaatgtcgtgtgttctggcagctttcccctcagtttaaatgtaaatctttcctcctctataaacgcagagcttcctcagttttatatattctacaggtcattttaacaaaagagatgtgatcactaactgcattctatataagggtgctgaaaacagaattggtatttgcatacaagattgcttttaaatgagtatgttcccaaaccctctctaacacaatcacattaactaccaccctaaaaaaaaagggacccccttctcatactaataaaccaaaagatatctgcgaacagaaaaccttacagtagctttagtagaatcccatgaaaaataagtggtgaagaagcacggttcatttccctcagtgattttgtataatggaacttttggagacaagccttccagcgaaccagccagatttatgtatctctgcgcaaaactgtacaatgagcaaacaagagagaaaagaaggaggaatcactatgctgagaagcaaaactgatgaggcatattacttggccaatctcaaaggcagtttgtttttccttagggtccacacattgaccaacccagacaaaaacttcagcatgagtatctagtaaatgcatttcctccgtcaagaggtcatcttgatcaaagttgtgaatctcttcaacctgtgcaaggtaatatgttaaaacatgcaacacatcttgataaaaaaacgttggatatttttctaaattctcacctgaaactttcctgaggatccatgcagacacatgaaaagaagaatgagaaagttaaaatatgcaagtatatcaacaacaaaaatgaccctattagatgctttgaccctcataattgatgtcttgattttaattacctctgttgaaggaaaaggagaacaagtgaggatccctgacagtctcagaggaaactttcttgctggtgaagttctgttttcccccaagtgcaaaccaaaaggatgagctctctgttccctcttttgcgtgcttgatagtagtcccaggctgacttagcaagaaagaagatgattaagtttaccagttacagaaaagtgataagaagtacgagtgagtttttatttaaaagcttaataaaaattataccattcctacttggacaatttcagctaaattaaaatcaaagataacaccattagaaactacctttaagaattc

SEQ ID NO: 109 - DNA, 87503 bp, Arabidopsis thaliana
aagcttaataaaaattataccattcctacttggacaatttcagctaaattaaaatcaaagataacaccattagaaactacctttaagaattcagcaactttagcagccagttcctgctgctcatgcgtactatggtttccaacccaaaggaacatggaagtacccgattgcagaaggaagcagtcataggagttcaaagaagttgccacctgcggaaaggattgcacaaatgtcacagacaatcgcagacctgtgtattcttaatacaaactaaacaacatctaggcatcaatttcaaattctaacattacacgaataggcagccaagttttgaacagtgtaaggtagaaaaagcacttagcaagagataaagaaaggtagaaaattaccgcttcaacttgtagagccttattattgtgaactccagttccagatacttgaataagtgcaattgattccggcgtgtaggtttcgcctgacgaacctttctctgtcatactatttttgtaaccagagctcaaaccgccctaaatgttagtgtaactatatcaattaccaatacattttcttgcagcaacaagcattctgtattaacaatcaaaagaaataccttaaggacaaccatatgttgaaaaagtgcaacaaattgtggaggctctttaccctcaaatatacgggcctgcaagaagatcaagttattcaacaatctttcactgctagtggccattacttacaataacaaaacatggtacctgcactggtcttcccttcaacgaatttgtcattgtgctcgctagacgaactgctgtttcttgatcctcctaaactcgggagaaaacaaaatttagatggctaaatattcaacatgttcaaatatatacataattgaaaaaaatgattagatgaaatctaccacaatatgtacccaaactttgaccaccacgtcaaaagttgagaggcaacaactcataacaataaactacaatactaacagcatccctcaatagctaaagagtaaaactgcagcacatttacaaatatgaattttgaaacatcttatagacccaaccaagtttcaatcttacttataaaatgtcttacaagacaaaccaggaagaagctaaacatgccggctttgtcaatacattatgtcttactatcctctttccagttattaaaagagctgaaaatactaacagaagaaatagggacttcctttttatatgaacaaaaatatcaaagatgcaccttttcacgtgattacctgattactattctttccaaaccaacagcacaagaagtagtcttctttcctttcaccagaatggtaggtataaaggaccagatagcagtccccagaataaagttttccgacatgatctttggatagaacagtcttggagttggcatcaatgtaccaaacctgttacatgagcttaatgagtttggatgaaaataaccaattagattgagcaaataacagcacaacaagtcagaagacagaacagacctccaactttccacctccttcaagcaatggtggaatatcctcattcactggtgtgctttttgacaggccctttaacccaacaccttgttgcttaagtaatgctagacaataggaaaagtaccaaagtaagtcagggataagagatctttcattgttttattaataatttagagtatcaaagcaatctttaccagcgacttttcctcgtccttcttcattagcaggagttgccgagcctgatggccaagagtcaaagttagacttgaaagaatggggctcataaccttgaataacacgggttatgcgtgttgcctttggcctattttcactagcaacaaaatcctgtagaggaaggtaaaaatgagaaccaatcctcagatattctaaggctaagcaagttagacgattctagctttacctcagcagcttggatagcagtttttctctcttccacttgagttactcggccaacccagataaagatctcagaaccgcagtccaaaaggtagcatttattgttttctagcatagatttggacaaatcgccgtctatagattccacctgaccatcagcgatactaaaatagggcaactataaatcaacatccataaacgagtaatacataaaaacaaatgactattaagtgtttacaacattgtttaaagcagaaaacatctgaaaaccaatagagcagatcaaaagggagacaagtacctataaagcttaggcggagttgtctccggaataatttcatcctcactcgcaactttccttgctattggagcaaaccccccaaagaggacccagaactcgccagaatctgattctgtatctaattttccatcatctgttatgcaaggaaattattatacatgcatgagtaccgcaataaattgattgagcatccaactgctgcttgattgactgatcaaaacgtgaaaaagaagatattcaaatattagttgtaatgcgtctaatacaacttaccaacaatagcaacgtcagaagttccttcatgaaacttgtctttcaaatattgaatgactaccaacgctttagctctctcttggatatttgaatttgcaccattaaactgataaatcttttccttggtgtccaagataaacacatcatcatgattcagagatgagcgtgcaaaaggaacctacaaaagaaaagagataagtatatacatattaaacactcatgcgaagagagtgtaacacttctaaaaatctgcagcaaagaaaacctgcttcaagtggacagcacgttttcctttgcaggtatacagccgggtttcaaactcctcctcctccggttttttaaatccagacgcaacaccaccctctagtggtataatgcaaggcttgaagtaagacaagaatttgtcagattcatgaccttgaatttcacgatattggacagctcggcctccaagagctgcatcaagttcaactgtcttgacagctgctgttccagcttcatcctggaattatcaatcgcagattagtaataatgacgattcaaatttagaacgtaatatatgctatcatgcccaaaaataaatacctggcttgtatctttaccaatccaaaaatgtatatcaaatagataagcgccacccttattctgtgtggtctgcacatatgaaagctaatcatgataaatgtgaaagataataaaggagcatatattttatacatatgatcagacaagaaagcatgttgtcctgttctgtaagctaatatcttattatctattcttgataagagtctataaaaaggggagaagaagagtgaaaaaaatcaaaacctgcaagacaatgtaggtatctcccatatagaactttccatgttcagactttggtactgggactggctcaaaattttcgattctccagatttcagtacctctaagaaatgttaaagttcaacatctcagacagcagtaaaacatttaacattaccagcaaactggtgcatacaaaagagatagcaacaacaaatagcatcttcctctctgtaggaaacaattatattgcttcccttgagatctaatactttttgaaaggatacggtttctgccccactccttgaaacgcaggatccaatacttttgttgacccagacattttgtattagtggctaatctcttccttcaagagaaaatacataaacgacctgccaaaaacatagagcaagcataaaaaataagaaggtaagagattgttttataagaagaaactggcgcttggataggagcctaaaaaacactaaagagcaacacaaaggtctagcttttataattgaatttctaaatggcaatcatatatgagagaatatacagtattacgtagaagcatgtttgagcaatatattaactctgcaacaatctgagtactcagttctctcccacaattcattattatctggaaatcattcataataatggttcctcagggaaagtaattcaaggggttcaaaactgagcctggctatcactcggagtttcatgtatcgctataagctctgttgtgaatatacatctctagacatgagaagcagaggaaatgcaaataactcttataagatcagcctcgatgattactgaatcaaaccttccttctggcaaacatctcccgccaccaaataatcgaagtaatcaattaaactacagtagtcaggctctagaatgatctacatataaccttcaattccatgtggatctcaaccattttcacaatgaaagtccaagacttgaaacagtgatccaactttgcagtaatattggtacacactcgcgaatccaccacttgttttggtttaaagatcaacgcaaacttcaattctgtcttagcttacttttaactgaatttcgggtcagaaaataatccgatgatcaacttgttcgttcttgtttctcaacggatagagccttacttttgagaaatactaaagtaagctgatgaatgcatgaccacataatcagagaaccaaaagaagaaaacaatcaattttaaagcagagatcagcaagtacaaagcagaccgagaaactcagattcaagtacaaacaaccagagagagatccaaaaaacgttaatttgaatcgaaatcagctgatccaaacaaacccatcatacctgaaaagacagatcttcgagtagcgctgaggaagacaaagagatgggcaaaaaagtaatggagagagatcaggaacaagaaaacatgaaaaagaagagagagaggaaaaagcgaattattgaaaggagatgtgtgctatgttatagcatctctatacaaacctttcgtggagattttgtgatataagagtagtattattgcgtagacgaggcgaggaagaagaagagacagagaggtttgaggaaagacgcgagcgagactgtgatttatttttaaggcagaaagagagattaattataaaatatatatatatatacaaaatgcaccaaagagataaacttaatttaaccataaagtgaattttaatttgtcaataatttttgcagagtaattaaatggcataatattggaatttctcatacatgataaatgtgtgattggtgaaaacagtcagtttcaacaatttggtttgttcatgttttctcttactattcacaattaagaaatcatgctgagccttttgaaaaaaacaaaaaaaaaacatgctgagtttgaacttggcagacgatgttaaagatcgaacataaaaggataaagaaaaagtttgaagcatattataacaaaatgcacactattattagtaattttaataacatcatcatttcaagacgacgacattgggtccatttcgcatgtgaatagacacaaacaaactcttttaaaaggatacatttttatgcatatgaaaactttcagtatcatcatagaaatacactaatccttttacgggatctactacaatcataggaaatcttgaaaacaatcatatatatatggaacaacattattcgatattttgatcatctttttatatatatatatactcatatatatatactcatttatttggtatttatcgttatatttctagtgtgtgtctatatattccttttagacatatgaaaagaagtagaatattacgtacgtgcagaatgatggcggtcaccatatctacgccggtgccgaccaattaacctcaaccaatattatatacttttgctaacctcagagttgtttcatcaatattttacgaaataccactatcgtttattttttggaaaataaatgatgcgttataagaaaagtagtagtatatattaagaagcaaagccaactcatcatgaaggcaatacaatgacaactcaaaagaaaaaattagaaattggtcgctttcattactcatgcagtcaaaataatccatatactttgaatatatgttgccggttcgaagcagatgacaacgacgtgattttttatttatttttgggtcatagaagataaggttactcgactcagtactccaagtgggataggaatatttaatttcttttctcaacctcaaacggatttttttttatttcaagtaaaacggattaatttaacttggataaaatgtattccaaaaaaaaaaacctttattcacttcgttgaccatttgttgtgtgttggatgaaacaatgttttgccgtcagagcaatgcgcatagtataagcgtcacaataacaccgtctagttcaaagtgattattattcacgattgcaagtgacctttcttcttcaaaacattttaactgagaaagttataaacatcacgaattacatggagaaattacatcaagagaaccaaaaaatcaatgaagcatttttttgtataacacaaatggtaaatctgtttctaaacatcctttcatcgctgcagctacttactcttgttttgactcatcattataccaattccatcaatagcggatcaccttccgccatctccctcaccaatttaatgaaatcttgttcgttcgagatgctccaaggatgaactgcaggtgcttccgctgaatacaaactcaaagaagagtttagcgaagctggttctgacttatataccattgagcctagaaccgggtcaaaattctgaggcgaatccatcgataggaagaacataggcacagcaactttgtaatgcaaatccatatcaccaacgagattaacaagatctgtaaagtctgagacgaagcgtttagggacatagaaaacttccgagctgcacatcgttaagcttgtgccatcgctattctttgtggcttccttgtaattgacttggaaatgaaccggcattgtactgacaattttcttgactaattccgcctgaaccgaataccaatccgagttcccggctggtctcaccgttgtccatgactccgttacctaaaaaagggactctttgtcataaaaccgaatccaaccataactcctcaaaccaaacattttttaaaatccaattggtactattatatttatgctgaacaactagctactgaatgagtaccttgtctgtagtccagagcttggttttgtcagcttgaagtaaattccagtaattaagaactgtatcatcttcaacaaacacaaatccgtcagcgctgctgtaccgatcaaatatcttcggtagccgcctgaaatggatataacagagctacagttagaaagctcacattggtggaagaataggttgaaactgagattctatgcaagtttccttgattacttgtatatgtgatcgagtttagcttcttggacgtaaaggtctgagtttttccgagaggacaaaatgaccacggttttgaatatccgcccataaagtaacctccattcaagagcagtacgttccacaggtccgttacagaacattataagcactacattcccaaaattcttcctccacttaatcaagttcccaatttcagaactcactgtgcctatctcctcgaccccaagatgaaccgaaggcaatttcctaggaacaaactcttttctatctccatgaccaatggttgctcgtgggcggtccaactcaagtgacattaaccgaggctgctggtatccgaccataagcaaatcctggagccaagcagctgtgaatttcacatctagctcagtccaaaacccttgttcagccataacaaagctcaaatcaagaatcgtctcgaagaacctatgcttatttgatctccaagcaagcaagaatttgatcaaacgaccgacattgatatggagatctttctcatcagagaaagggtaagcttcgactctatcataccggtgaacagttggtggataaacagcaacataaccaccaagctcccataaaagcctttgtccccagtaacctctaatcacatctgaagccatggaactaaccgaaacaggaagcattaacccccaaaacgcagaggaatggtacaatgtgttaaacgaattcacaggcaccatcataccttgaggcaacgccactttaggagaatgctcatcgaatctgatatcaaacggttcgaaagtcgtcttcctagtggaataatacacggaatcaacatccggcaaaccgttggaaatcccttgctgaataaactgtttaccaccaaaaacctcagtgtaatactcttcatgattgatctcacctacattctctaatggcaaacctctaggccaaaccgatcgttgcccgaaatggatatacggattcaccacagttcgattcgggttttcgtgactatactgtaagattggttcttgcctagcgtcttctccaactaactctacatcaaaatgtttcccaagatctccatcaatcacttcaccacgatcatctgcatcaaagatcttctttgcaccatgctggatcgcaaacaagtaaccgacacttttgcgtacgaaggaatcataaggcaaatgatccaaaatccggtaattaagctcagcttgagcatctagagatagaaaaatcgcacctttgagattccaatctttaggtgttaaagagtttccgatcgctagaacttgccatcctttaatcttgaccaaacctttgagctcctctgttgggtgctttgtcaccgacacaacgatccatttctctgtacggaaactagcgtaaggtgaggttttgtcggagacgatttggatcgagttccagttgatttgagggcgagtgagagattgaagagattgagttgattgggattggaaacagaggagagaagcagtgtcggtggtgttgtagaggaagaagaaagcagcgacggtgacgatgaagaggaagatgattacgattctgtagacattgtcggaaacccatgaagagaaatctaggattttgggttcagcgaatcggtcccgactaggaagttctctgatccgagattttggtggcttaggagccacacgatcttgaaccaacatcagattcaagcactaaacctccaaaacccagaccaaaacccagaagcaagactctgaattcagataacaaaatcaaatcacaaagagtagtgtaggtttcctatccagggcaaacaaagagagactctctctgcaggaaatcggttgttgtcggaatttggaggttgcttatgcttcaattcaatgcaaactgcgaaagcgaagtcgttcgttgagctgcgaggtcaatgtcttcctcttttgggaatttcttagtaattttttttttttcctttgtttgttctttacgttttgattactgaaacactacaacaatgcccacatcactcatctatccttctatgtacaaagagacaacaactaaagagcagatctgtaggaccagagaaaccatcacatgatggaaaaggtacatattaactaaaggctgattagtttattaaattatctaatttattttcttaatgactacagagaccaataagtacatttaatactaataattttgttaagatcagtgtgttcaactgtgtgttatactgtataacttatacaagaatcaacacttacaagatatacaatgaagaaaaaagagagttttatggagcttatctttcaccaatagtctccacaggagcaagttccattcttgaaacgatgaaacctcctaacatctctcaagatgatttctctatcaacaatctttgagataaacttggttgcaagatgacaatcattacaaaccctgaggtttttagccaccctaataattgtaccgggtgatgtgttaagtatcccaaacgcaattgctagcttctcactgtgtccacaaagcagaatctctttttcatcttcctctacattgtggagtacacaagatgtgtcaggtacatatccttcttttctcattctctcccacaatgtctcgagatatccactgagcttttcgctttgcgggtgagatgagtcaccggctacaaatttatgtacttcatcgccatgctcaatccagctacatccaggttcttttctcacgccttgctctttcatatttcttcttacctctgttgctttatcccagaggcctgctgatgaataaatattggcaagtaacacatagtgactagctacatttggttccagttgaatgagattttgagcagcaatttctccaatttctaggttattgtgaatccgactggcaccaaggaggctactccatgctccagctttgttgaaatcacgaggcatcatattcatgagttgatatgcttctttaattctaccagcccttccaagcaaatctacaacacaagcataatgatctgagcttggttcaaccccgtagtcgggtttcataacatagaatatccttaatccttcatccaccatgcctgagtggctacaagctgcaaatactgagatgaatgtaacctcgtttggttttactccctgaaccatcatcattcttagcagatctatggcttcttgaccgtttccatgcatcccgtaagccattataatcacattccaagtaataacatttttttgtggaatctgatcaaacacttttctcgacatctgtaggcacccgcattttgcgtacatgtcaactaaagcgcttccgacagccacatcagttgccaaattgttcttgatggcataagcatgaatttcttttccttttgctaatgctgatagtgcagcacaactgggaaggattgtcatcagagtgatggaattaggtttaagactaactcggctagcccccttgctcacttttctttcaaggttttgcatcttgtgtagcaggagaagtgcgtcctcatggtgttctgagaatacataacccgtaatcatcgtgttccacgtaactaaatctctatcttccattttaccgaatatccgcatggcgatatcgatctttcccagcctagaatacatatccatcagtgtattctgcacaaacctgtctctatctaaacctctcttcacaacaaatccatggatagcttcctttctagagaacgcaccagaacggacacaagcaggaacaacacctgccattgtggtagagttagccagaagcccagcactttcttccattccaatgaaaagcaacaacgcttccttgtcatgctcattctgggaatacccagcgatcatagcattccacagaccaatctttctatcaaacattccatcaaatactcgacgaccactcaacacttgcttgcaattgcaatacatgtcaaccaaagcactaccaacaaaggaattctcatccaaagagccatttttcaaagcataagcatgcaattctttccctgtgcgaagcatctccaagtgtgaacaagcaggaagaacacttgaaatagtgaactcatctggttcaacaccttcaagcaccatttcacgcaaatattccaatgcttcaagcaactgctcgttctgacataacgagctcaacacagtgttccatgtgaccaagtcacggcctccaaaagaaccaagtaagactttagaagatgctaattttcccagtttaccatacatagccaccaatgtgttgattataaacgaattcaattcaccctttctcaaaccataggcgtgaacctgcttacccatcattaatccctcaggcataggcaaattcgaacaagcagtaaccacactcaccaaggtaaacgaactaggttccacattttcatccaacatacaccgaaatgcctctaacgccatttcccacttctcaaaactacacaaagaagaaattaaagaattccaagagacttggtttctctcagatattctatcgaacaccttatagacagctccgaaatctccacactttctatacaaattcacaagggtattagccacagtcacggaatccacaccgtacccaaatttatacacatgggcatgaatctgtttccccagttccatgtcctgaagatctgctacagcctttagcaaagcagggaacgcataattatcgggttttatacccaaaacaatcatgtcaacgtaagtcaaaacagcttcacggagcaaattagatcgaactttggaccggagcaagtcaatccaccactccggagagcgtgattgagagataaatattgaaggtgcgccagaaacggcggaggcaacatcttcggttgcagaggttggtgtggcgcgaagaagataaggatgtttatggcgggaaaatggaagcagttgagaaggaaaggggaaaatagacgggagagagaaggtgaaggcaagaggacatgacattaagatatttctccgaaaatatctttatttgcttatgaaatcgaggttcgtggagatttctgttaaactgtatcagtaacagtaatgcgtagacgaggcgaggaaagacgaagaaggagatagaggattaaatgggccataaggcctttcatgggcctaatatatgggctcatcaattttaattcctctctaggcgctgcaatataacagagtacgaatgaattctagtgagagacagaaagtgaaattcaaaaacaaaacaaaatcagatcatcgcgccattcgcagaagctcagagaaaaacttcattcggaagaagaactcagtaatggcgacgtatccttctgtgattgagagaaccgttgcttcgtctcttcttctcctttcctatggaccagtgttcttctcacctaaaaggttcgcagaacccaatctcgtttcaatttctgtgttaattttgaggctcgcggttttagatctgtgttatcttccttgtttgattatgattatcgtattgggtgattattaggtcggaatctgtagaggaatcgagctatgtgaggaagtggtgtcacgaaggaagttcgaacttgagcttgatgttgggatctagcggatcgagatcttgtggctcggctttgtccagcgatggttcgtttgggatgagtgaggatcgcgaattcaaaatcaattatactggagatccgtttcgtctcatgaatttcaaggtgcgaaactcttcttcttcacgtctctgtttcagagttttcttttggttgttatctagatctgaatttgagcttaagaaattccaaattatgagaaacttgattgattagtaacttctctttgttgatttattccgtttgagcttgatttttgaagttactgtttcgttcttcaacctgaatgataatcgctagctcttagatgtcccaattttctttttacgattctggatttagtgattagtttaccagaaacggatcgtttctggaatttgagattttcgaatttcatgtcgactcgtttgctttgttatgctctgattttagtaagaaacatatatttcagagaacaaaactttgagtagagagtgtgaaaattgatgttcattgactgaattatgcagacagcgagaaaacgccgttctcaggtcatttggggatccttcaactttaagccaacacatttgaagatgaatcctgtgtgtgatgttctctcaacatgctctgttgattccaaagatgagtcatgtttgtcaactggttcaagcgaggtttctagcgtagaaagcagaatcaaagtcaggaatcagaaaagcaatgagaaacttagaggaggagggaagacgatgaaagaaagtagcaggtcaagttctattcgccgtagagccaaagacatcttggagtttctttcctctgaatcttcttcagaagttcacatccgtcagattcttggcgacagtcccgataccagcaaagctctcagaatgtatactcttcttctcattcatacaacagcaacaacacatacacacatttgttacaattttatccatgatttaggtttcatttcttagttaagcatgcaatacatcttcaagcctcttatgcatgttgggtttaatggaagatagttagagacttctagtactgatcaaatcctgatgcaggttgttgaagatggaggaagtgaagaggtttggcacaggaggaagacttgatccctttatttacaaggtatgaaacttaaaattgcacatccttcattgtgatatatattctagcaataagtacatttaaattgatctttttgcctccttatttttctgtagattgcatgaaagattaagacattaatgctggaggcaggtaacacttatatcccctttcccactatctagttatatacagtttggtttgatcctgatatgggctataggaaaacgtaaactataacgggaatgcggaagtttatatatatagctaagatatagtatatggtctataaacgttcgctttgtaagaagtggctctgttacatacagataaataactgaagtataactgaagtataactatataaaatatagaaaccgatgttagtttgcatgtgtgaacctcggcctattggttgattccttgtgagctgttaaacactattggttgatgaataactactttactaatctaagaaatgtgattttgcaaaatatattttgaaatcttcctaatgggatagagaaaatataattaattactaatttcggattaatcattatattgaaagaaatagagcaaaataatcaaaattcattggattatcttccacgaattttcggtgcatgatgaattgcttatgacatgtgttatttttatcttataaaaactctaaattttaaaggttataaatttaaatcactaattacggaataagtttactttagttattctactatatagttcaacaaacactctgtgaaaaagttttttaatcaaaggttttaagatatatcatatatttaactatttaagcatatcaaatgtgaaaattggtcttaggttatgatgtatatccttatatagtaaaagtatattagtctaaaaatttagatttaaaaagtgaactaaaatttaaaagcaagctgaattacataaatcaagtgacaattgtaatttgttgtgacatttgtaagttcataatggtacgtgtcacgctatgttaattaagtttgaaatatgagatgtaagaaaaaagtgatcaaaaattaagttcttttggagcgttaagtccaaaggtcaattagagcgcaatatcagtccagaaaagtggatgaaaaatgtccatccatccatcgagaaatatgcttaaagtaaacgcttacttttcaagcgaccttcacggtattgccgcagtcaaaaatacgcggcgactgtttggttggtatagtgacgacccactctcacgcggattcattaatttcctatcacaaataagaaaaaagaaacgtgaaattaatttgttaagtaacaaaaacaaaaggaaaaggaaactgacaagaaacgctaaagtggttccttccttgtactcaaaaaaacgttaatttacagctcagaataagtttttctgtttaccgtaatttcgacccaatatttttacgaataacaatttagtccaaaacctctttgatatattgcaatttaataccctaattaagtcttcttatctagtaatttggttttatttccatgacctacaatataagataatagtcattagtgctagatataaagactgaattagggtatataagatatatggaatgctaagattacaaagagatagagaatcaaaaaaaggaaagaattaaggggcaaatatgaaataattaaaaacaagggagccaaaggaacaatgtaagaaaagcaataaaattaaaaacaaaaccctcaaaaagaagaaagcggagactcgttagctttttcctgcctcctataaattgaacgcgacttgcagaacctttcctcatcgtctccgtctcctctctctctatccacgagaaagagcagaaaaaaaacatatagaaaagaagaatttagatacaatagattcttcaaggaaatggggaaatacacggagatgttggacgtcggcgtgagaatcgctgcgaggtttcattcacactgtcctcagacggctcgtctttattaccatcctccatccgacaaccatcaccatcacggcggagtcaaagatttaatcggaggtggtggggttcttgggtcaggtcaaaattcgaccggtttggttggtggtttaggaaccggaaccggaactactggtggttgcggtatcaaatcttctcaagtgtatgatgacgctagagatctcttgttattctctgttgtttgatttaatttatttgacgaacacaaaaaattattataatttttttggttggtgttggagagagatttcatgagcgtttggttgtgttttcaattattattgagaaaattgtatgttcttgagaggatttgtgatactatttaatcatctctggattccaaaaatttctggggattattggatgttgatgagaaattaatttgattcattatttttgtttgacttcgttcggatttaggttgccgcatctttggtttaaaccctaaatttattgtcgaagacttttaccctttggggccatattaaattccttgcctacggctgcaacttgattatgagctgtataatcttttaaattatctgcaaatctgcaatctattattataatagtgggattcttaagaacatatcaacaattagatcaaagatatcattcgttgaaccacacccaaactttctggagctatcagcatcttcgctgtcacaatggttaaacaaataatactcaagaactcatattaaacaaaattattaaagatttcacaattcaacaactgatccaaaaagatctggtaggttcgacaattccacagtttaacaattaaagtaggtaaaaagtctttattatttagtttgttcgacaatagctacaatcatcaaagtttacacgataaaactctgttttctaatacagattctagtataaaatgtcgtttggtatatgaatgaatgtttgtttgtgtatatactttaaaagtgttgggacctcatcacagtttcagctggctacatcctttcaacgatgcataaagaggttgagagtttctgaaaccaacaatgtcttcgatctctatggatgttgatacgactttgtctttgtcagatgacatttcctttaaatgttggtttccgtaaacgcatacactcagcgatttcctctttggtgcgccaacttttgtgtattcgtcaaagaaattgatcaattcttccttctttagctctctcagtacagtcacctaaccacaagacatacccaaataagctctgttattggcttcaactatccaaaaagatagactaacgaaatttgcatcatggaagtaactagtaagaggttcttcagagatagatagctaggaaaatatagatattatttgcagtttgtctattacctctgcatctatgcggttgaatttgagtgtgccgtctggaatttgtaattttggaatgcctttataaccgtttcctattacaggatagggaagcagaaacatatggattcaataaatctgttatcaaggcttattgcatgtagtgagaaagtcaatatctacccatgtacaaaccgtaaaatgaagagtcgtgctattttagaaagaaagacgaagtctattaacaagtataccttgacaacggaaaacctgtcaggtttaacttggaagtttgccatcttttgaatgacagcttcaagcaagatcctcaatttgtgattaaagccagtaagagagagctggaaatgagaaactgttagtcaaacatgaaactcattgagaaaattacacaaggaaacgtcagcatccttgttcaaacacacctcaaaaccattgtccgaaagacttaatccatagtgaagacgagcagcctgagcataataagctgaaacatacaagtacagattgatggaacaattttcatgatatagtaagaaactaggaaggctaaacaccttactctagtttttattgtatcaattgctttaaattgttctttcttaccatattcattcaaatagtccaccagcaaccaaacagaactgtttgaaagaactacagtggcgggagagctgactgcaagggggcagttaaaatccatcttgaatcaaacagaaaatagcagaggaaaataaacatgcaagtataatcagaacttgaggaaattaatacatcaaaagccaacctgaatggtgaatttgattatcttctcagcagtgttataccatggctcaaccttgtcagtttgcccttcgtatttgattcccaaaagattctacatatataatggcattagattctgcaacaggacaatcctactttgccataatcccctaagcaggtcaggatttcaatgcttgaactactatgggaattatgattaaatagagatcacatggcccatagaataaacattacgcttggtgaacacctatgacttaatcagaaatttagatacatttggtcatggattgcttttgagaagggatgcattccaggaacagatacctaccgaaccttaaattgaaataagaagcttagatgatagaaaaatatgagaagtcgattgaacagctgaaagaaagtattaccgtcatgtttgatgaaatattcactgcataggaaattgggtctattttggcttgataatgaaactctgcctcaaaaatagctgagagcttcaacaaaaataaaagatgtatcaagctctttaaatacactgaatcaataggaatactaacgcaagattataagcgcaacagtaaaacctaatattacaaatacctcgtcaaaaatccactgggaaacaccagactgttgtaaaagcttaatttgtctgaacaacaaccctaaaatatctttcatatgctctgtataacaagcaagaaacaaatcaaaccaaaatccagaaaataacattgcactgactaaacatcaagcacaccaagaccactcattcaacataagaatattaaaacaaacaagaaagaatatagaaacccaccatggcaagcatcagtaagattaatcgaaacattgaagaaagaatactctacagtccagtctggttcgccagcatacagtcccgttgcccaacctgtgcaagtattagcaataattcagctaactattagatgtaaaactactaggtaaactctgccaaaacatttattagtttggcaccaaagaaaacgtacccaagattttcaacgcaagaaacaaacttcctttgccttcatgaccaattagatgaccaacgtacgtgcatgggcttcttcataatgatggatgctaggagtcacaggccacgaaacagtaagattatgaccctgctttataggaacagccttcacaagaacctagtaccagtataaaaacacaaccaccaaagagaagagaagcactaaactgatctacatttatagaaaaaaagaaatgagctaggccttccaatccgtccgggtccgagaacgacccaacgctaacgttcattgaagcagcacactaaaaagcaaaaaaggcaaagaaggaatcgtcatgatttttatcatcagtaaaactagaacaaggtctctgggtctctgggtcgctgattaacaacacctcgagcgaatttttgagtacaatcctcctatactctctcttgtccgtacgtgcctttagtatcacgccacattcaccagaagccgccgcggcgttctcaatcgccatcgctgttggattactttagctgaatcttttgctatataatccaaataacgtctttctttttctttttctaaacttcagaaagggactaagggagagggaggggagctgacaagaaattactggtgtgttatataagtctacgtctgactcattatcaacggtctatatttccccaagtgatactgatacagatccaacggcgatagctgaagtctccgctgggtcttcgctcgcatatgtccaagacttgttgacccacgtggtcaatgccaacgttggtttatactttttttttttgacaaaataaaatcatacagatttagacttcaatttatgccataagttttcatcacataataattgtagaatccttaattctaagaatctcatttcagttatgatttgattattctttttattaattacaaattgcaaatttgtcataatgttttccttgaaaagtcttaataaagtggtaatttgactctctcttttttttctctatgtgattttatatcataggtgttaaggttgtgttgtgttgatctcttagtaaaacttatatagaaactctagtctatcttgtatttgttttcatgaagtgatctaatatatttgtttgtatcgattcctcgttaaatatgtgtaatctctatattgtttattaaacttccatatttaaaattttaatatatggtctttctggatggatttaaaaaattgtgtaaatttggttccacgatttatttataattaaatatcttaaaagctctattttctaacaaaccagatgaataaaagttcatattttggtatatgattgtgtgtatatatctatgaaaactccagtttagtttttccacagtttacttatacatgctgatactattgaatataagtactgtgaatctgtgattcaataactccaagtctcctgtgcatgtattctaaattgtgtgatagaaaaaatgaatgaaaatgacctttttgggtttctttactttattttccttacttaaagtattggcccaataaattgttctgaagcagtagcctaataacacgtaagagtagagaaaaattgtgttggtgattagtgattttattgcaattgttcgtttctttatctctctctttctgtctagcatatttaacatccgatttagggattgactataaagagatcaatattatgattttcttatgaagattcttcctttggaactgatattctttgatctctgtgtgtttagcatattatcatccgatttaggaattgattatatatgtttatttttttcgtaagagcagttaattacaattagagattcagtcatggtggttgcggtagcaagatatgtgaaatcgttgtggtcaactcgtgcgggtgttagagcatctacattacatagatataagaggatgtcttcaatttaaagacacagacctttttattttattcatttaatatctataaacactcatattacttgtgcaatggaggtggctttacaccatccacattggatattttagggtagatgtcttccctccaaaatataattattcaaatgtttggatgtttttaaatgagagacatccttttcaaaatgtctaaatttgtttcaattgagacattttgggaaaggggtctctcatttaaaatcaccctgcacattttaataattgaattaatatgggaggacatttttgttagttatgcaatgcggatgatcttaaatagcaacttgctatttattatcagagagcacaacaaggttttaggacaatttttgggaggaatgattatactgagagaggagtaatcggacctagattattctaagagcatcctcatagcatagcttttgatatgtgtctttagtatagattaataataaaatcaaagacatctcttctttttggtgtctcaaatgtcttcctagaaacacaaatcaaaaattaaagatactcttcatttgttttatatttttttactagttttatatttaaagacacccacaaaaaaatgaccaatgtgggtgctctaaagggatgtttttcttttactaggtttttatattattctccataaatgtgttccattaaactcttttaaaaaatctaggagatgatttatatccatatgatcgatactttgatgtggataggatcttttattataagagtgggattcttaagaacatatcaacaattagagcacaaacctatcattcgttgaaccacacccaaagattctggagctaacagcatcttcactctgtcacaacggttaaacaaataatactcaagaactgatttgctatgattaaacaaaattgtaatagatttcacaattcaacaactgagccaaaaagatctgttaggttcaacaattccacaatttgacaattgaagtaggtaaaaagtctttatcaatatctttgtcagacaaaagctacaatcaacagagcttaaacgataaaactctgttttctaatacagattcaagtataaaatgtcgttttggtatatgaatgttgtgtttgtgtatatatctacaacaggaataatgttgacacctgcaatatagcactcaacaaatgtcctcgacaacaacattgggacgaaattcgccaagtcttcagctttcaaaaaagaaagagcatctagtttctctatcctcaatttttgactaaagccaacaagagagagctggaaatgagaaactgttagtcaaacatgaaactcattgagaaaattacacaaggaaacgtcagcatccttgtacaaaacacacctcaaaaccattgtccgaaagacttaatctatagtgaagaccagcaacctgagcataataagctgaaacatagaagtacagttgataaacagttttctgatataataacaaactacgaaggcttatcaccttactctagttttatttcgttcttcagaataacatattttaacttgtcttacaagaaacgcataagagatacattataaagcagcagactcgtcatctcgataatcaaagtgagtactgaaattttgtaacagttatccaatttgaagagagctataaggaactcccagcagaacaataacattttaggtgagacaactttggagacgagaagaaattatctacgtctgactaatatcaacggcgtatgttttcccaagtaataatgattcaacggcgattacttgggtcttcgctaggctgggtcttgggtctcttagctagtattaatgtatttatcaattatggtccaacaacgttctttccttttctctctaatctagtgtcactatccagtgtggttagagtctgactatgatcaacggtgtatattttcccaattcttgatacacttttggtcaacaaagccaagttgccaactcgaccgttgaattgttgtgtaagtttatgaaatagggacctaaaaagtagaatatatgaaagttaagtatattgaataactatgacatagattatcatccaaattttttttgaatatatgatgccaagtttagctatttaaatatgacaaaagtctgttgattcgctttggcatttgtgtgtttgtattccctgtttaccggaatagagttgggacctcctcatagtttcaacgacccgtaaagaggttgagactttctgaaacagacaatgtcttcgatttctatggatgttgatggaatcttgtctttgtcatttcgcatttccttcaaatgttggtttccgtaaacgcatatgctcaacgatttcttatttggtgcgtcaacctttatgtattcgtcaaagaaatctatccattcgtccttctttagcagtctcagtgcagccacctaaaccccaacattgaggttcttaaataggagattactagaaagaagttggaaaaaggaagagttttgtctattacctctgcatctatgcggttgaatttgagtgtcccggtttgaatctctgcccagtaaaaccaggattcctcatccaagttcttgtccttttcaagcttcatatctatcaaatttgttacattgctctgaggagaaaagtcatgtccgatagtacatcaatgtttatctcaagcaaatcaaatatcatctagcttgtgtctctaaccttgaattcttcatcgctcatattgtaaaatttactctccaggtcctttagtagtgactcaactctcgaatcaatatgtcctggaccctattaacgataaactcaaaaccaattaaagagatctgcattgattatgcaaagtcttgagtggtagagaggcaatacaagtcggtaccttaactgaagactggataatgaattgtacaccatagacgccagaatcgttgctgtgttgaagaaaagtggttatgcatcaaacataactcagtaaatattcaaacacacgagaaactcctatgtacctcagagaaagtgaggtgatgtagccaagttgctcaatcgttctaagctggtgaaacgtgtcttgttttgcaattagttcgaaaagctgaagtttactattcatggaaaactcatctttatgaacctgttcatggtaaaccaattttcattaccaagaacatgaaggtcaataagaagaagaactcgcaaagagtccaagtaacaagatctacaagaaaagctttataagactttagttcgaagtctatcctactcatcttgtcacaactatacctgaatataatgcactagggcagaattttcatcactggagtttgaaccttcctgatagtaaaagtgtttcattcctgttccgagctctgtaaccctatttgtcaggaactgggatggaaataacggacgacaaataggttttgagtcggtaaaaagaacatcttcaatatgcttgaccattgactcagcttcgtccttctcaacattccctggaatgagacaccacaagggctataagaaaaggaaaaagataagagaccagatacaatcatacagtagggataatgttgatatacctgctatatagcactcaacaaatgtccttgataatagcatcggaacgaaattagccaagtcttcagcttccaaatgagaaagagcatctagttcctctgtccaaggccaaatctgatcttgtaatactagtgagcagtaattcgttgcttgttcatgtggttgttggaatttgttattttggtatgcctttgtgactgtttcctattacaggacaggggagcagaaaaaatggagtaggtacatcagttcacagggcttgttggatgtagggaggaagttggcaatatcttaccacgtacagaccttataaagaagcgtcgtggtaattttaaaagaggggcgatgtctattaacaaggttaccttgataacggaaaacctgtcaggtttaacttcgaattttgctatcttttgaatgacagcttccagcaagatcctcaatttgtgattaaagccagcaagagagagctggaaatgagaaactgtaagtcaaacatgaaactcattgagaaaaatacacaaggaaatctcagcatccttatacaaacccacctcaaagccattgtccgaaagacttaatccatagtcaagaccagcagcctgagcataataagctgaaacatagtcaagattgatgagagctacagtataaagaaaaataagagatccaatataaagcagcagactcgtcatcttgataatcgaaatgatactgatatagtaaaaaacgttatgtgaattgaagagagctagaaggaattcccagcagaactaccacatgaaagcatatcgtatgagacaactttgaaaatttcccctaaattttacttgaaaatcgacctttgctttcagagccttagttccacatacttagcatacaattttcttgaatgatatcaagaaaaagccgtagttgatagagaaatgactgaaagacgtctagctaacaaaccttaccatattcattcaaatagtccactagcaaccaaacaaaaatatctgaaagaaccgcagcgtcgggagagctgactgcaagggggcagttaaaatccatcttaacgtatgcctttggtttgaagaactttgtgtcaggcttataccacaatcttgagtatgatgtctttctcagcaaaacaggaaagatatcctgttccagaacttaattacgtgacataagcttactgcttcaaacattagaatttgaaagacagttgtaaattgtaactagagtgatggaactgaaccttatcctttaaatcctttaatgaaaaatccgtaggaatgaagacattaggtgttggtagaagcaggtttacatcaggggctgactgcatccactcctgtaattgttaaacacaaattaaaattttcctccagagaaacggaaaaatattgaatcaaacagaatataaattcatgcagaggaaaataaacatgcaagtataacggatctttaagaaattaatacattaaaagccaacctgaatggtgaatttggttatcttctcaagtgaataagcagtgttataccatggctcaaccttgtcagtttgcccttcaaatttatttgactcccaaaagattctacaaatataatggcattagattctgcaacaagaaaagcttactaggccgtaagcagtcaggattcaatgcttgaactacatgtaaattgtatgaacataacacattggggactgagggctgcttaaagtaaaccgccaaaataccaatggaaattttgcataaaatagagatcatatggccaatgcaaagttagcttggtgaaaacctatgtagtttacaagacatttagaatatagtaggcagcaaggcatgcattccaggaacagagacttaccgaacattattgggagaaagctcatcgagaaccttttgcacaatagctggattaaatttcgaaggcagtgatgatcctaccagccaatgcttggttggatatatctgaagcataattgcaaaaggacacagaagagtttttcaaaaaaaggaaatatgtctagccaagaaaccgagtttcctatcttcatccacagagatcaaactccatatgggtgaactagtaatgcttgatgaaattgtaagaagtacacatttattctactttttgttcatcgtaatggccacatatatatcaagcagaagcttacacgataggaaaagtatgataagccgaaaaatactattaccttcatgtttgaagaaatatccactgcataagaaattggatctattttggcttgataatgaaattctgcctcacatatagctgagagcttcaacaacaataacagatgtataattaagaaaactaggtagattaaaagcagacaacaacgcaaggtggaacttagtaacaccaatacctcatcaaaaatccactgggaaacaccagactgttgtaaaaccttaatgtattcgaacaacaaccctaaaatatcttgcatatgctctgtataccattcaagaaatcaaaccaaatccagaaaatatcaggtactgactaaaacatcaagcacataagaatattagaacaaaacatagaagaatacagaaacccaccatgaccagcatcagtaagatcaattgaaacattgaagaaagaatattccatactccagtctgcttcaccagcatagagtcctgttgcccaacctgtgcaaatattaggaagaattaagcaagactactagatgtcaaactgctaatagccttaatgcacacgtccgcatcaaaaaattaagtaaacaagcatctgagcaataaaaccctattcgacaagaatgaaatttccctagccagctccacaaaatcctcccatgttactgtctaaccataagctttttagtggagcctatatgacaggctaagaaagggcagaaaatttctagctactatctacagtttaagcaacaaataactgtagtttctgaagcatttttctaaatatctgcgagacaacctaaaactgtttgtatataaacagcgggtgaagaaaaataaggaaaataaagatcaagcaagaaaacctacccaagatttttaaggcatgaaacagacttccttcgccttcatgaccaattagatcaccaagatacctgcatggtgcctcttcataatgagagatgctaggagttacaggccatgaaacactaagctcgtgaccctgcattataggaacagccttcacgagaacctaaaaccaatgaaagccaccaccacagaagataccactttagaaacattctagcatcaatttctcttcgtttcctgtaaatgctaaagctaaaataaggagaggaaaaaacctgcaaatggtctagagtacacggctgaccaggaaatcttggaataccctggttggtgtttcgaattccctggaacaacgcttccactagaccttgagttttatcaagattttctgaagacatccagagcaaagagatgtataaatgttatatagaaataaaaaatactttgttttctgaaagtaataaaaaatctgatttttgggttagctccgaaacgtacccttgccataaacaaccagatgcatgatgttggcagaatagtgttcgtcataaaatttaattagttcactccttgtatccactccattttcttcgggtcgtacgtgaagagtatccatattccctaagcaaaaatatcactctcttagcaggatatataaaattgggaaggacgacggacttatcttatacatcacagcaccaaatcatgttccatgaacgccagtcaataccagataaaaataggtcgaagataaacctgtgctaaatttgtgatatggatggtcttctctacttagatgcttctgtaactatgtccacgaaaaaggaagacaaaatccaagttagatactacaaacacatcaacagacttgtttaaaagaaacccgtgaaatgcacgcttcagtgccaataactagatggatagatatagtacaattaacacagatatttgttcttgagagaatggaaaaatacctgggccatacgccaagagtcagacaacaagttattctgatgctctggataggagaacttgttaggaatttgttatataagcaaatttcaacaggaaagctaccgagaaagtcaaaagctaaccagagtcgaccgccttgatctccctcatggtggcatcagttgacatcagtggctggataaagaactgtgcaaacctggtcaggcaataacataaaaatccaacactgtcaaaagaaaaattagtaagcaagagataaaaaaaaacaaaaaacaaatggaagtcaacctgtccaaagcttcataaaaagaatcagtgttgatatcgaaatggtagtttgtatcttcactggaagtataagcatttgtgctccctccatgctacaaaaacagaattccaaaaagcacatcccattttattcctattaaagttacctttaactgagaaaaagaaaccgataaaagacatcgattatattccagagttagagagaaacactacctctgtgatgtacttggagtaactatcttcctcagggtatttttcacttgcataaaacagcatatgctctgacccccgaaaaaacaataaaaatcacaagttattcaccatggccatcaaaatccacacgacttcaaatcacaggaaagagttgataaatacactgtttatagagacagtttagactttagcctcagctcagtgattgaatcctgcaatgaagaattaaaacgggaataataaatataaagtaccaaggaaatgagctagcccttccaatccttctgggtccgtaaacgatccaacgctaacgttcattgaagcagcacactagtagcaggtaaaacatatataaattttcagctcttctttaacagcaaaattaaaacagcaatcgagctttaccttgtcagtctctgggtcgctgattaacaacacctccagcgaattcttcagaacaatcctccgatactctctcttgtcggtgcgtggcttaagtatctcgccacattcaccagacgccgtcgcgttctccattccaaccgccatctccgttcgattacttaggattgtttcgtaggcttagctcttatgaatgtctctactaacgtctttctttttctttttttgctaagaagaagcaagcaggaacaatggagctgagtataacttatccagtgaggtacagtctacgcagaactatttatcaaccgtgtgtctatcctaggtaagatccaacggtgagaaaagtcaagtcttcgctcacagaaattatccagtgtgatccaacgggtcataacgcagcatcaacaaaacttagcccacgtggtcaatgccatttgataattgtaatttgtaaagatcacatccggatatattcaatgaaactaaatactaaaatagagattaattaattttagaaggatgtgaagatattagtttttatattaagatgaatgtgttatatggattactattcaggaatgcttttgataatttgattattaggctaattagtgaagcgactattatcacttgtcatattctatgtacttttgaaggcatcagtaacaactggtttctatttgtcgacatcgtaagtgtcgaatgttagtgcagtccctctactgtatatcatcgtaagtcaaagatacagagagacactttttctctaacttctaaaccctaactttattttcatgggtaattaatatcgtccgatgcactgtaacttttatttaacctacaaactctctcgggcttcttctccacaaggttgattccgaaggtcagtgatcatcatctctatttaatttggtaattctttttgtcacagcacatgtttgttttggtttgtctttttacagtcaaaacatgcaaggagctataatagtacaatgtttcccaaatttttaggaaattgctaattctgcgttgaaggtagcacgatatgggcatagacgttttgttttttttggcaacaagaacagcctaagaagtggttttgattattaggttagcttgcgagatcactattatcacttgtcagattctatggatttaaccaatggttacttatgctttcaaaaacccttgcttaaatccagatcaatcagcaaagtgataatagattatgtgtatttaatttacgacattgattccggggtcaaagctactttttggtgagaagccataaattgaaggattttacacacttctatatctgtcttgagtttaggtactttgtggccgatgaagccaatattgttctacttttggttgtcaaatagtttattaaaacaaacagtgaatcatagaaattttgaaacagataaatcctatccataggatatctttgagtatcttgtagacataaatcatctcttaaattaaaatcaattaatctctttatacaaaagagttatcttgtttcatggaaacatttatggagaataatataaaaacctttagtaaaagaaaaacacccttttttggattatctaggaccgatcactcctctctaactatgaccattcctcccaaaaatcgtcctaaaaccttcttgtgctctctgatgatagcaagttgcttttcctgttcgtaaataatcaaacctacgaatggtaatcccattgccatgattagatctgtaacaccctcgggagttgaccacatcgatttcacatatcttgctaccgcacccaccaccatgactggatttctaactgtaattaactgctcttacgaaaagaataaacataaacatatattatagtcaatacctaaatcggatgataatatatgctaaacagagagaaagagcaaaatatatcaagtccaaaggaagaatctacacaatcaaaatttattaaagagagagaacctgacaggtcagggcaaagtggttcccgaactcaaaagcaaagctgtgctccaaaccctacctgtctcgccctcttatatagcaaattctcagattgtgtgccttccaagtcccgttattttcggcccgaagcccaacacatacttcgaagtattatccaatcaattatttattttaaaagaaattatattttcttaattaagatttgagagggattttccaaattcagttatctcctagaccaggaaaaccaattcgacaaaacaaaaaccgagctcaaaagaatatggaaatttctttcttcctggctgtgttacaaagaatgatacaaatcacacaaatataaaaccacttcctttcttctaggctttagaagtgccacgatgatccttatcgatatgcttcaatagatccaccggatcacgaaaccctctactacatttgggacaaacatcaaccgtaactttgccacaattctgttttccattcctctcttgcgttttctctgaattgccatcattgccactcgcaaactgtaacttctggcttatatcgttaccgagtctactaatacttgcttccgcagaagcgaaaagactagaccatctcgaagaagatgatgatgatgcaggagcttcttttgtgtttgtactcaagaaacccatgaatgagaaactcgattcaggcttcttgggtccagaacaactatgatcaggtccaaaccgatgtttcaaacaatgatcgatgctacaatctcgacatttaatagtattggagaatgtcaagagttctctgcatctaggaacaggacatttcttcttcttgacagctttttcgtagttagatggatcacagtctgtattaacatgtttctcccaggtgatgttgggatcttcgtcagggtttaatctaactcctttagcacataatggacaaataaccacagtgacatctcctctgtttccttttggacaatcgtgtttcatatagctacgatgatccagacaatacaccttcaataaattttcaaaaaaaaagttcaaaagatttgatataagcttcctctccggattcagataaaacaaatgaatcttttcaatcatttagcatctaattctttcgaaatgacgattagtctagattcaaatcaactactgaatttgaacataaaaagagacgaactcatgtataaatcatataattgaccagagacttagaagaagccacgatgattctctatacagaaaaatcatggcattggaatggtatcgaaagaaaacggagaaggagaaagggagacctgaaggcagcgatcgcatgtgaagggcaagaaatcgatctgtttgcaataatcgacggagcagtgtttacccagatctggaaattctggagttcccattgttgagaccgagctttcgagaatattacacaaacaacaattccgacaaaaaaaaatcgaaaagcaatcgtaggatagtatagagaagtaagaaaagatggtttattagagtttcccggcgagatagacacaccgggaaaagaaaatccccagattccgagaatttagatcaacagaaaaactcgggcaaggaagaagaagaagaaatttgtaaaggaaagtcaacgtcattcccatcttcttattttcttcttttttctctctttgactaaaaaaaattcgatttcaccaaccaattaaaactgtgactgggcttactaaggtctaaggcttttattcatttcatttcaaaacttgggctttaaaacatattcaacgatgttgggaacaggcccatttatctagccttctcttctgcaataaagtatttttgtctgattaaaacatattttccaggtagattatataaatctcgttgtaatcataccttatatcattcactgctagatccaaattccatattgtttcaagccgtaaaccccaattataagaagattcgtatgattgaattcaaagtgtaaaacagatacgtatctagattactaaagacattataaccgacaaatcaaaaaaccaaggttggaacaaaatctgacttgagcttttgacaacactcaagtctcatgtaacaagataaagtggtattactctacgcttttgtctacaacaacctcgctgatcttgacgccaggaggtataagcaagaaatcagtgtgctcttggtatggtgattttgagaatctcgtctctttccagaattccggtgtaaggaatccgtatgtcttctgcagacaatcaaatgttgcctgaccaaaaaaaaacaacaacaatttgaattacattagtcagaatttagcgtaatcaaacaacctaaagcatttcaattcaagcaatcttaaacacaaactcacatgctcaaaccaatacaatcagctaaatcctaatcttcaatataaattcacttaactggtaatgattactttttcactgcctaattcagagttcatcaaaccaaaacagccattgtgaaagtacataccttgacgaagtttccaagagttttggtggatcctctagaagaagtaaagacatcatcaattccagcgaattgaagaaccttcttaggaactctagccgccacaataccagaacctctcggagctggaaccatacgtacagtaacagatccacatttcccggttaccttacacggaaccgtatgtggttttccaatcttgttaccccaataacctcttcgtatcggaaccacagacaatttcgcgagaatgatcgcgcctctgatcgccgtcgcaacttccttggagcatttgactcctaatccgacgtgaccgttactatctccgacgacgatgaaggccttgaatctcgttctctgaccggctctggtttgtttttgaaccggcatgattttcatcacttcgtctttcaatgaaggaccgacgagtaaatctatgatctggtactccttgactgggagagaatggaggtagatctgctcaatctttgtgatcttaccttcctttacgagacgaccaagcttagtcactggcacccatttctcctcctctggagcacgacctgcacggcgaccacgacctctcggaccacctcttccaccgccgcgaccaccgaatccacgtccgaaatcgccgcgatctccaccacgttcgacaccacgttccgccattgtcgatgcactcgattttgcgtagaagagctaggagatttgattcagttttcggtgtgttagcgagaaacggcggcaaaaaatgattctacttatatctccagacgagaagagatagttagggttttctggctaaaatgagcttattgggtttataagcccattactaaactaaggcccaacatatgattcgtgtaatgtaatgactgtttcttgattcgttttttttttctgtgtcagttattgcatgtttcttgaaaaatatttttttggggtgataattttttcactgcataaacattattgagctgacacattgacatatttaaaaataagaagatacagagatagaacaagatgaacaaaccccaccattgatattacctgccaaaaatcaacagacaaataaaaagacaagaccacgtaaaaatctaaattagttactagtgagttcacagataaaaatgaatttatatatatatatatatatatatatagtcatgattatcacatttattttgtaagagtaagtaatggttagttgagtcaaagaggactcaataggggagagtagaagtggcagagagagagggtggtggtcattgaaggagtaatggggacaacaaaacaaacacctcttcgttttaaccaaatgcatgtggtttttggtttttacacacactgaggacaaattgggaattgcgaattttaattttttcatatataaactgttttactatttacgtcaaaaacaaaagcaaaaaacttttttatttttctcattgtatgtttttcacatatatatacatatacataaatatccttaaattcaatgcctatgaaccaattaagttcatagaatcatggatagaaaaggaaaaagaaaccatcataattacaatgagaccattagtattcaatgttataaagatgtttttttaggagtaacattttttttttaatgaaagtaatttgttttcttaaagtcgatataattaaccccactctctctacttcaatcaagtcttaaacctttgctcccacaagctcacctgaaactctctctcttcctcttctcacactgtctctctcatgttcggagccacggcaaggctcgatgaccaactcagcaccacaccaaccaccatttatatagacccaccctcccaagaccagccgagtcacaactcggaccaccgttcaatagaaacactcgttgttgtcttagccgtcatcaccattttatccgtcttagccggcgttttcgctcggctttgtggcggtcgccacttatctcacggcggagaccacgacatcgaaggttgggtcgagagaaagtgtcgtagctgcatcgatgccggcattcctgccgtatccgctgctccttcacctccaccgccgccaccgccagcaacggcggaagagcggagtaagccagcagccgaggagcaaaccaagaagtgaagtaaaaaaaagggtaaaactacattcttcgttttagctttaacactatgtaatatcattaattttgaaaacatgttcctttttttgttatgtaccttagtctacggacattgatttcggaatttcctcagatgttttatgattatttatgtctttcaaaagaaagaacaaaagcaaagttctttgtcaacttttaactttaaataaatccgttgagattaaagagcaacggcattaaccaaaaaaaacaccaagatttactttatccttatagcaacaaaataagaggaacattcacgtaaaaagtaaatcatttaatacaatggacttttggtaaagtaggccaaaacataagagcatccttaatgggggattttaaacaagtttcttaacaaagaataaaaaatttatatgatttaaatattcataagtctcttaactttgatgaaatctaggcaaattgtctcttagttaagagataattggtcttggtttcaccaaatttaagaaacccataattaaaaatattatttatctatacttacacttcaattttgtttaagagacttaagcttaaaaactaccattgaggatgctctaagggttcgcttaaatgccttggtccttttggttgattatgggatttaacatttttatgtaagtacattgattattgaatggactaaagagtaaagtaggccacaataatgcaagcgctcactgaaaactaggttaattttggtatttagcatctcttattgaaaaacacacttataaattactagcattttcatgcaaaaaaagaagaaggcatatttcgatttaagatttacaaacttggcccatgtgacttgtatcaactatttgcacaattaagaaccttagtatatactatgaaactctattctcactccattttgcctaccaaactataatgctgaaattgtgcatattccttttcatttctagtactagtaaatcaaaatattagacaaataatcttattactttattcatgaaaatacaataacaataaatattggtgattttatatgtaaacaaatctttcgactatttttgcatatatctttactacatgtattaagaagcaatgcatgtagtacaatatacatgctatatataaatatgcatatctatgtaaatatgtgtatgtgcattacataattagctcagttaagagcatttaggagaaacggtgccttgatttttaacattggcatttttgcaagaagctgttcctccttttattttcacgttctcaagcacaatcccttgacatggatacttctcgctgcaattcaacgttatcgccacatccgtagcgctcgtaccagatatgttcttgtacacaacgtttttcacttgcactgccgactcctgataacatatttcacattttcaatccgagtgaatgcttgtctagtaagaagaagaaaaaaatattaatcgatcaatcaattacttggtcttcgcatttgtccttgtcgcagtagtcctggtcgattatgatcggattcttgacgttttccattcgaatattttgaaatttaatgttcttggcagttcctgatcctccctgaaatcattaggggttgttattgacaatttcaaaacatatggtgcaaatttgagtggagtgtttgtgaagataatcaaaatcagccacctgataagtcttaatcctaactccattgtcactctcagagaacttagcaccatccacattaattcccgagacataagctttcgaattgtcgtcccccaagctcccaatgcttctcatcataaagattaaacaaagatcaatatattagtttatatacttacttcattgaattgtaagaaccatcaaattaacatcaatactttaaaatataatatagtttcactactcttatattaggatttgaaagaaaaaaaaatatgttttgatttacctgatcccgtgaccggggccgcaagttaaatcaaagatttgaagattttgcgttccatcctcaatggatatacaatcatcacctatatagaagcaaaccaagaacattctgattatttacgaatcaataaatgatagctaacatccttagtttagccttagcatgcatttgttatacatatatacaccactaagttaacaatatatgaatcattacctgttccgatatctgagttggagactcgaatgttttgagtattagtgatatggataccatctgtgttgggactatcgcccggagcagtgatctcaacattactaacttcaactttgttgcatttctcaattgaaatctgaatctgctgcgcatttttcaccctcagattcttcacattcaaattctttaaattgtataaagtaagagcctgcgtttgcataaacacacccacttgcaaatatcaatatcaaacgttcacgtagtttagatgtgaagaaattaatcaatcaatacatatacatggagatgtgtttacttaccgttggagcttttgtgcatggctgcatacaaaaataaaatgtaaccaattaatattaatatgatgacaaagaaaatttgactaattaacattgtgacaattacttaggtattatttaaataaactatatgtatatgaagctattggtggactatatatgtgcataccttagatttgtcgattttgcatgagttctgccaccaggtttttccgttgccattaataattcccgtcgagccaccgtcgattgatagattgttaacgtcctctaagataagccaatggtttttgtctttgtaatctgaacgtttcgtagatgctgataaagtgcctaggatctgcagttaatcagtgacaaaaaaaacaactaattaattgaagattactgagtaaagttgcaaaaacaaaaacacaaatattacctgaaagttacgtaaggatttgcatgggcctctaaatcgagtagacttaaggagataagtctttcctttaggaaccaagaaagtagtaactccatttgttgaacatgctttcttccatgctttcttgaaggcctaagcatatatttcacacccatacttatgcatgcatcatcaatacaaaataaaacatatctatatcttttaaaaaactatgatcgttatatcttttcacaccggaatttggaaattccgtaactaattattgatattaataaagtttatatccaacaaacatatatgtttagacagaatacaactaacctgagtatcatcagtttttccatctcctttggctccgaagtttgaaacactaacggttgatgcttccaaagtggtttcgtctgagcttatcaagctaagaacatcatcgttgttgagcttgagcaagctatcggattcaaaacttccatcttcatgaccatatccatcatcaacgttgctactcaaagctttacacaacgagagcatcaaaagaacgcataagaaaacagcaagatgtctgcaacaacgggccatttcgattttgatcggttttgcagaaaaaagaatgtgtgctgttttcttgtgagtgagatgagaatgtttgcctgtcttgtttgggattgtgtaatatgaaattgaagaagtgggagggtgtaagtatttatagacgaattgaaggaggaaaaaagttaggtttattaaagttttaatggcgtacttggaggtatggagagaaattgagattgatacgaaaacatcactttaagcttcaagccttacctcctctcccccctattttttttttaattgttttaattttacattgagagtttcacagtttaattagttacgtatttttttctgtaaattagaaaaagagttaattttcatcatcatatactattcacagtaacatttcatcatgtgtaattactgagctaagcaatgcgtgatgtattatatcaaaagttagaaaagaatagaaaacaaaaatcagcaaaagtgacaagaaaacgtcgttgtgtcctgtgtctctcaaagttttgggttccttttgttatttcttggttcttctgtttttgtctgtgtctatgaggctctgatgatatcatcgtttaggaaaatctgcagaaaacaatatactgtattcatcatatttctttgtatcgcatttcgcatattaaatctcatatttttctttgaaaattggcatgtttattttaaaactcacatagttccgagcatcgagtattaaactacatgcgtttctcattatttttcaaaagttcccacaaacgacgtcatagacttgtaagttgtaactaacatgagagtttaagaaaaaaaaagacagaggacttatctggattattgtcttggatatgtgaaaatctgaatatttttgctatctaaaatgttaatcataattccttaaccagacatgattaaaattgtaacgaaatagtttgacacctgatttccatcctctaataaattactaatcattaaaccaacatgaattggtataccgaaattaaattgttaggcgtactcgtgagattagaatgaactcattaagttcatgtcgaaaaagtgcatattgctatgttgtggacttttaattaactagggtcatggtcagttatcaatacttatttgaaatagttaaaattcatttactttcgaagaaagttaggatgatatatacgtaagaagtgtaaatgtgccaaagtaccaaattcaaataagaagtgtaaatacgtaaacggcaaatacctaatgtaatgattgaaatggtatggtaaataataacgccaacaagatctaatttgcttgaaaatcaactgaaaagtttatcgggaacaactttgcattcaactcccaaatgatgaaaaatattagtctcaaaagtctttagtagttagtacaacacgtctcgtgaaatttggtatatatggttcattaattagttaattaaaaccatacattaatttatcataatgaaaataccaattttcttccaaaataaaaataaaaataccaagttactttggaaatttagttatgaatcttatgatttactaatatgtcaattatttaaagtttagtattttgttattgaaaccatgtcaagcattgttttctatgatttcaaaggtgtcttttagtataatttcaaagaaactagcggccaaccgggttgcggcttaaagaaacctacaaaaatactacaatgcatgggacatcatgaacaatggtgaagacttgatgcccatacatatattcctatcgattaataagcacaaaagatcacgtacttatccttattatactttatctaattgttttgtaattaccaattaattaatacaaatatttgtatatactagtgttaatatgtagatgcgcgtatggtgtaaaaataggcagaagttaaaggcatgtgcgtagtttgcttgagagacctaaaggtatggtcgagagtcatgtctttggaaatttatctagtcattgttataacttggccttagttattgcttccttctttgaatttatctcttgtatttttcttaattaatggttacgattcaacttgcacatcgttttcgtggatgtcactatttcactatttcatttttaaaatattactacttggtgtaggtaaaagagcaaagaaagataaacttaaacactgaaaaagatggaaaagacatgtacgtttgaattctttgggattccgtgcttcgaattgggttgatcgtgtatttatgagctaactaatgttttggggttttttaattttttgaaattaatgttgcactatgttacgttccatggaaaaatatcaacaaaaaaaaaatagctagatgaagaaaaaaacagagtaaaatattcgtatatgcgttttttttacaccaaacaagtaaaatatggaacacaaatattagttagctcatatatggattgtcgtacaacaaaatgaagtttgaagagacgagatgatgacgtactaatccatacacatttcattgttcaaaatatataatagtactagtatctgttaatttcgttggtgcgaatagtatgtaaggcgtcaaaaagtttatgatcatcatataactgacttgtcatcattattcgtattgaccctttaaattacgtactctacctggaacttcttctgattttttaggtattgtaacttgtaagagtgtcggttttcgaattgtttggctaagacgactttagatttgtaaagcgccaacaattctaaatatatatataattaccctctttatcagaaaaaatattctaaaaataaaatcattaggctttggttccaaatagaccaaataaccaggatttaattttggataattacttcaacgactatttctaattggggacttgaggttggccaacactaaaaaaactcacagtttcatttgagaggaaagccgaaaaatagttaattaggaatttaggagcaaattatttgttttaaggtactatattattagaacgaaactacaaggggacggtgcttccccaacttgacgagattacattattacaaagcgaagaatgaccattaatttcctaatttattgatgcctttatactacaaaatgatgaatgacaaattggtgaaaaaaaataacttattggtggtctagaccagaatctcaacatgccatctgaacatttcctccctcgtcaccggcagattcaaagtcacaagcccaacctcggcgtcgtacgtgaaatcagtctctgtgctttcaacggcgcattttagaggacgctgagaagagtaagctccaaaacgaccacagcctctgacactgacagataccagagctgttggagaacggttatcgctgagcgcgggagaagccgaggagatctctccatcgaagaattcaggattcttgtcggtcacgtgattgatatcaatcgactcgattgctccacttgagttgaacatgtctacaagtcctattggtgcgaacgaaatgttttcagtgatttcctgtatagccaaatttcgtcattcacattatgactccaagttgttatcaatccaagtcatggtaatatacaacaagacaaaacgtaccttcaaaggagagatgtggaagagttcatattcaaggactttgagggtgagaggaattgaagcacctttaggtagtcttaccacctcacctgtaaatcaaaaccaagctcatgcttttagtattgatctgaagtttcaagtttttttcttatttgaggaaagtagattgattgatttttatacctgatctgtatgcatagactattgaatctccactccaatcttcaccagccacttgagagattagatcagcatcatccgcacggattgaacccgtgagtgtgccaggagaagtatcatggatctggttcttcttcgtttccttgcaccaaccagcaccttgacaattgaatacaccaacaataccagtaaacttattcatgttccagatcttgagcaagctgaaaagaattcagtttccgcaggtgttagttaggcttaggcttagtcttaggagtggaaaataaagaagagaagagttagttagaaagcaggcaaacctgattccatctctagctggatcagcgaataagcagtcacgggtaggcctacccgggagcttagcccgaagaactgaaccatcaggaagaaccagcttcctcaatagatcaaagttgtggttgcctggcttatcactgctcatataatttgaaaaaaaaaaacatatctccagttaaaccctcagattaaaacattacctagtcagaacaagaatcaagttaaggatgagaggagagctttacctgacatagattgcgcatccacccactgcacgcgctgcagcatggtactctgcagttgggtgtagactctgaagacatcaaagcttcagttacaagtgaactcatacttcttagacttgtaaaaaaaataaaatgtctctttacttacatggaacatatcccagtcaggttgcatgaactctccaaggaaaaggctgttgtatgcaaccgatgcaatgtggatggtgtgagaagcaggatctcttgggtagaaatcatcggaagctctaacaatagcggtttgttttgcgctgtaaagtccgtctgtgttgtgacacatgcaagatatgcaaccattatctgtgaagttccgggcaattgaagcttctaaagcttgctggtagctacgagtgagagagactctcccgccaagaccagcacctagggtttcaatgatgttctggacgtcaactttgactccatctataccacatgaagccaagtatgaatgcagttcgttgtagaagttgaaaactttcttcggattgacaagtccgagaccatgaacagcaaggctgtccattactatatctggttggttccctaagacacctggagactgaactgggtatgctaatgcactatcatagtgttccattccagaagcagcgggttttactccaccccagtatccagctaaagcatgccatgcataaacttgcctgtggataaagaagtcaagccataagtatgcaatgttttttgtcaaatgcttgatgttgtgattaaacaatcagcttgaagaccagagtgttgtaaattaagaagaaaggacatacttcacattatggcgctgcttcgcattgtcaactacactctttagtcctgacacttgcgtatccttctgatcactcttctgaaattttgcattctccttgataccaacaagcctagtagcaaacctgcatacataagaatgcagaaaaagttagcaattaccaacaaaatattatggtaacaactgtagaatatcctcaagctcgagctgtctagtgagcacactcacactcggcttatgaactaaggattcgacaattccaatgcatagattgaaatagatgaatcttattttctttcaaccacatgaactttagtttaaagtactcaagcctcgatctagttttgctggactattatttggtgaactgaggacatatttaagatgcccatctatgtgactacaaaaataaaagaccgagagatcttactgtgctccttcctgaacaacgcagttttcatctttctctttgttttctatttgttgccaaccatcgtctatgatcagaaacttcggaggggtacctccttcagaaagactgcaataaaccaaacacatcagagactcaataaacttatactgcggtaagcaattacaagtatattaacaatatgccactctacttccatatgaaggtaccttttaaggccttcatcaacaccctcggcagtcacatctgtgtagaaagcgtcccatgtgcaccagccaaaccagtctaggaaagaaggaagctaaacaaacaaagtcaaagacaatgatgagatcatataaaatcagattgaactcttgttgtgaccaaagccatgaaatgttcaatcaccttcttcttctcacgatgatgaaatgtctgcatgtgtctctccacagccctgtaaaatacaaggattgccgcataagaaaacatatataaccttcacatcaatgaaacagagacataacataatattttggctattttgcaaacatactttacggattgtctgataacttcaaagggattggttccagcatgaacataaacaaggtgagttccctggctagtttccaccgccttatctcctgcaaacacaaaatcaaccaaaaacgaaatttcaattctggtctggaagttgtgagctcatttctatggataatctgtacaacaaattcccctaccactctcaaaacaaatctcaatctcattcttctcatttccttgcagaacagctctgaactggccttcaaggagagggagaaagacggtataaacagtaggagcatcatccccattcccttcaacctcatccttgctttccagtagcatgaactgtgtctccaaaggaatgtcttttccacagcttcccattctctgagtcatccaccatagcttaaaccggaaacagcacatgaaccgaagacccctgagaaagatttaaaaacaatttgcttaaacaaaccatcaaaggacctgcgtattgctcaaataagttatagaaagacgctatatcagaggaacaggtatatttaggtgcttactccaatacaccgatggggaacacatgaagactcttgctttgttcaaacgtcgcgcctataaatgaaccggaaacgaatccattaccggtaaccggagttaggataatgttgtcagggattttggtaaggatagtcttcccttgaacaacgaggttatcgttctgtacagagatatttgatgtaatcgtcatcttctcaacaccgcttctagattaactgtatcagataatcacaagggataaaccaacaacgttaagaaacagatccttcaagaggaattaaacaaacaaaatccaaattagaatctttccaaaaacggaacatgaatctaagatgccattttgagataccaattatctgctcatacccctaaaggtctagcaaattcgaaacaatgaattaaaacattcaatcaaaatttgagttcgaaacataacaatgaaaccagaagtactcaccggattgcttcctggttcgtccgagctcgcggtactagagcgagaaaacacggcgatatgagggttgagagatgaactggagtttgcagaagctaaatgttgcttgtgcaaaaaaaatagagaacaaggaatcgccgccaaaagtggtgactcctaccgtcaatgaagaatcagtaatcagaacggtgtgtttggctaatgaaggtggcggagaagacgctttatatatgcgaggagatttggtaagagccgttgcgatgttgccacgtgtcatattattactctttttccgtggagatggaaaagttgctagaaaaaatcgtgatatttttgtcgctctcctattgctgaatcagagacaactcattacaaaaaaaatatactttgttttttactacgttctttcgattgtgtcagttttttttttggtaaaaataccaaaatactactagcatttaaattgaatttcgtatatttttataaacgaataataataatagttgtagttaatataaaattaaaaaatattagttaaaaaatcagtttacccaaattttagcctactttaaaaatgtcaaacggctgttaacggaggaattgctaatatgaaatgttgaaattatggttgtttctagctgtgcaagaaatcatattaaacatcgaatcaaatcatattctgaaactgtaaataataaatcgtagttatttttcactcttgatacaaatcatcgtaacgaagctcaaatgtacaagaaacgtgtaacgtagttccatacgcctctttttatagtatatttttcctagttgaatcgcgtgtattatggaatgccagtaacatatacacatacatcaccgatcattcacccataagttttacatatctttaattaatatttgtttgatatcttttatagtcctaggaaatgacatatctgtattgctgatcaaatttgaaaaacttaaggacaaagtcaattcacgagtctggttcagtgggtattcaggtatctcgattatatcacattatcacattggcgagatattcaggtatacctcgattctcggattcaacattatgttctaaaagaagacaaaattgtgacatcggatatcttcgaggcgaataatccactttttaatgttataatttcgacgagactattactctttaatatcttaaaataatgcatgcatgaaattatgtagtcatgtaagatactcactctttaacgagaacgttacaaaacttaatcgttttttcttttttctctatcaaaaaagaacaagtcgtttttcttctatatgcgctattacatcttataaaaactttacatgcataatgtaattatgccggataattatgaaatatgttgtaaaaaccaaattgataaattcgggaagatattgtatatatggaccgaggaccgaagcaattccattaaaatgtatggttcatagtacttagaaccgtcttcaaaatatatataaacttttcaacaaaacgactatcgaagccgcccaatactataaacacacgatataaacagacacatgtttattactttactttaattgagaaagtattatgcaagttgtgttttagtttgactcctctgcggagcaaaccataacaacgtcgctaagatacggaccgtaacacatactcacacttgatgtcacgatccttatccgcttatctggaaccacgtgtgtggtcaacactcgacgaccggtttgagccgggttaattcacttggctgctctttcgtactaaaagctacttcctgttgtggataattcgtggaacgacacactaataaataataatgcatggtacgataatgttttaaatcgaacctaatatatactgtacgtaggtccgtcgatcggtacggattatgaagatagagtttggtatatatcgactcattacttattttacggattatcttttatcgttttcctttgttggtttttgcatttcgaacacttggttctttttcattattgattcagataaaacgaaaaaaaagaaaaaacaatcaagctctttaatgatgtcctcttattcagtcattcctaataattgcatttaacccccaaaatagttattaaagaaaaacgaaagaaaaagtacgtacgtaggtgaatttttgtaatgaaacggcgcaagtgggtctcatccacgtcagctctgtttaatcaaatgttaaaagatctaaagtatctccttaattagcattgatcagttcaccatgtccttgtctagattcctttttcactttggacttttatcattaggtgtgtgatacgattataaattttgttggctctatgtatataactttaatacgacgattaatcaatgataaattacggtgattactataatgttaactctgtaatcatgtatagtgtccttccaaatcatattgttatttactacaaggtcgacatcggacatgtgtatccttcgtgtaccgttcaacctcacgccttttgcatgattgatttgtttgattttcaataaaatttggcaacaatacaaaaatagccacgtaagtctcccgtgtcgatgagactactacgaggtggatatttattagacgtaccaaaaagcaatgatttgagttaaattgcttttcacttgtatgtttgtgattataatacttaacagatgttcagtgatgctatttttatctacattgtgtgggtatcagatttgtaggatatcaatatcatgaacagttgcaaactcatcgagtagatatgattgtaaatttttattttttataaggctgttgatcaaatattcaaatgactggtgtcttatgcttgatgacaataatatagaggacacaaatatttagtccacttgtttagatttgatgctgcgataagccaataacgacgtttattatatttttgtctgaattttccttcttctcgactactatagctatatgggattgataaaagtttatggccaatatagtttccgttatatacttatttaaaacattgtacagttttgaaaacaaaactgtgaccacaaagacaaagtcgaccaccaggacaaaacgaaatgggactttagtttctgattttatttgtacatctggctttgtgtaaattgagttaattacaaaataggcatttgtcttaagaatttatttattaagacatttctcatatgtcttcacgaaaacatgtacttatttcttgtgaaaagtcatctctaatatcatttcattggcctcatcttctcaagccgagaaagtctaattaatgttgtagtgttgtgtcgttgtatctgtgtatgcatcgcagactgtcaactaaacggtttgggtttacaagtccaattctagggtatatcgttttcacttcttcacctattttcacatcatcctaccacttgcaaaaatggaatatcaatttctcacttactccagaaggttaaaatcgtccgaaatcagacaataagcggcccattcaactgtgcaacatacctcttttgaaattattaaatttaaaatgcctatattcgatataagctcgtgtaagtttatctgtaaagcaagctctcattgtcaaaatccataactcatataattcttgaatggttatagaaaattacagattgatcacaagaaaaattgatgatattatcttttatcaacacaagattatacaaaatatctacacacagccaaaggccaacacggtttttctctcttgatccccatactcagctcgctcattagccaggatatcaaacacacaactcttacaactttatatgcctaaaaagctttaatcgtggtgtcataaaaaaaaagcaacccaagaagataaaaattaagaaattaagaaagatttgcatccctttgattcaatcttccagactggtgagtgacacagattaagcctctctcatcttgtatcaccattgacctgcaacgacgcatcttgcatcagtttgagactgatactgttaaaccgttctctcgagtactgtctcgaagcttttctccaatctgttcctgttttcatcatcgttacaaactcttcgtaacttattcttccatcctacaaaaaaaacaattttcatgatggttagttctctatgagatgggatttttttcaacaagaaaacgagagtgaaatggtgaagttaaccaaccttgtcggtgtcaacatcacggataatggcatcaacaacttcttcacttgtaccaagttcgtcagacaaggcttcccttaactcctctatttcgatatatccgttattgttttgatcaaagaacgcaaacgctttcttgagatgctcgtcattgcccattttccttaggtgtaccgatatggcaataaactcgtcacagtccaaatatccatctctatcgatgtctccctgcaaagtagaagaaaaccatccagagctcagttaactgcattcaaatcacacaaaaactggtattgaaaagtaatggtaaatcaaagctcacagcatccatcaaaatttgtaaatcatcttgcggaatggcatgaccaagtttctgcaacccgattttaagctcgtcgatgttaatcttccctctttggcttgtgtccattatttggaacccttctcttatacctgaagcttcttcatctgataaatgctcagcaataacctatcgagataacgtaacaagaccaaacgaaactattgttaggctttttagatcagaagagatatacattttcggatagtttataagtaatatgtattttaccctgagtgctcgtttcttgagcttgttcatgacggtgaactgcttcaaccttgccctcactgtttcacccaatgatacattgggggctgtctttgcattctgtaaccacgggtgatctgaggaaaatgaagcaaagaccgattaatactctttgtctgtctcagattccatataagcaaattgcatcatataaatctgtacctaggacttgttgagctgtaagacgacgcttttggtcaggatcaagcattttcctgataaggtcttttgcgttttcagaaaccttgggccatgggtcccttctgaagtctagtacagatcgaataattgcttgtgcaactccttgttcagtttctgaaaatggtatagaaaaaaacagaagaccaggttcattattcttatgatcacttcttcatatactacccctgaagacaacatgtgctacagacggcccaagaagaaggaaacatagactgacaaaactaacctgcccagaaaggcgggacaccacatagcagtatgtaaagaattacacctgcactccaaatatcaacttctggaccataattccgttttagcacctcgggagccatgtagtacggactaccaacgatttcgttaaacctctcgcctgcaaagaaaataacggtgtgggttaagattattgacaaaccacaaagcaatcagctatctactgagcagaaagaccacattacctggtttaaagaaaacagagagaccaaaatcaatcgccttaagaggtgcagtctccttcttgtttccaaacaagaagttctcaggtttcaggtccctgtgcattaccccatgcttatgacacacctgcaagaacacactcattaatctcacatctaaaatcactccacaagactttcaatttacatgaaaagaaacgaattttgaatctttctgcagcaaattgagccctttaaagcaatgctacaagtcaataatgtccaagaaactgaaaccagtaacaaaccaagacattatacgaggccattgcaattctgcaacaagtaaagactaaagagatacaataaacagcaaaaaaaccttgacgaacctgaacaacttccatgatggtcttagtgacagcagcagcagctctctcagtataatgccctctagcaacaatcctatcaaacaattcaccaccttcacaaagctccataaccaaatgaacagcatgctcatcctcataagtctccttcaaagtaacaacattaggatgctcaggcatatgcctcataatctcaacctctctcctaacatcttcaatatcaacagctgtcctcagcttcttcttcaaaatcgatttacaagcaaaaacgtcgtctgtctccttatcagtacatagatacgtaacaccgaattctccacgacctagctctctccccaacgtgtatttagactcgatctcacgacctgttggatcattcaaaacgataagcttaagaggtcttccacctccatctccaccaccgtggtgaagaccgtaatcaatcgagaaagggttttgcttcttccttccttttttgggtttgttatcgttttgagccaatgatcctgctgttccgcaacaattacccatgacttttccgatcaaacccaaatcaaaaccgatgaaacttgagagattgaggacgaaattccaggaaagtaggaaactttaagagaattctggaagagatggatgagaaaaaaacgaaggaggtgaagaacaatatatgaaagggtggaaattttcaacgcgtgaataccaagaagaacgtcaaatcatttgttcgaaaattaaaattgcgaaaaattaattacagagagagagagagagatgatgatggaaggaaggtcaagagaatcttcttccctcccttcttctccagctgctctatgattgtttttttttctttttttgtctgtttctttttttcactttaaatttttaattttcaaagaatgtttcttactattacattactctaatgtgaaatcaaaatgccttcagctttaccaaattactattgacaatattacccctatatgtgattttaattatttttggtgaatatatgtgatcttaagttaaggcttaaatgccgacaaaaaaaattaaggcttaaatagttaaatgtccaccaattgttttttttcaaactcctgcagaattttttttatttttagaatatttttgttcattttaattttagaaaactctttatttttatagaatgtctaacaaaattctagcaccaaataaatatatatctgtgaaatgaatcatacaaataattacgaagacaggggtgtttcaggaattttacctcatggattaaacagaaagcggagtctgtgacacgttcttaaactaagcgccttggaaataaaaaaaagttaagggtgaaaccgtaaatacgctcgtgtttgggttcataaataagcggccacctttattttatgttctgttttttttttataattaaaaggtcaaacacggcgattttgactctttttaatcactttcgtcggacccaactaactaatttttttgacttcgatacaaaacaaccaacatatgtaattactcaaagttatttgctttttctgtcaagttgatgattttggttttgcactataaaacttctaccaacaaatcgataaacgcattttgatttatcaaaatttaactgatatagaaataaatttatttttatttttttgtcaactaatttaataattgttcagattacagatatatgtgcaattgggtcgaaacctgtatttaaaagtaacataaatacttaaaattttactttagagttagtttatatataaaataattagcaaagtcaacggagtatgaatgtggtaagatactttatcaaatgcctctaaattaatatcaaagctcctgatggacattcctttccttacacgagtgtttgtcttactcctaccaagtcaatgattcaatttgtaatttgtttacttagattaccgttactaaaaaagagagttaagtgcaatatataattaggcaagaaatgaggggttttatacagtacactctattttctttagtatttgatcatttaccaaagactgagtcttgtttgttaaaacgaccaaaacaaaatatatctatgatattgatggacaaataaataggagagttaacaaagaaagggtatgtagatttctaccaaaaaaaaaaaagggtatgtaggcccattatggcagaagcaaaaaccgaaaataagcctttcttaatcagcccatctcaaaatctctttacttctctctttcttgcacttgtgtgtataaggtctatgttttgttcaccgtaagagtgtggtaagaaatacatacaagttgtatgcaaaaaggttttagactcgtctgagcaagattttagtgggttcgaaattccattcctgaaatacgtagggtttcgagctttgcagcctgaattagtaaattgtggcgtcttaaattacatttttgttaaagctcttaaacacatgagtgacaggccaaggtagagagagtaattaaatgaacagagctggaaactaagtaagagcttgaaccttttttttcttttctttaactctttagtcgtatcagtctcagcagatggaatgacaaaacaatacatgtaaacaattttcttggcttacaaataacattttattagtttttatgtggtgcagacaaagaaaaaagcatacaattacaaaatatatcagtacctttaaaactcttacattctatatatagttatatacacattgattcccaacagaaaatggtagcctatatatattgagacatttggatgtaactaaaactagtaatagcttagctaggaaagagagaagaatgatcgtttggccggaggtcgtccaacggctctcatgagattagcaacttcaagaaccctcgcaacctccgtccctcgtttaccttccgccgtggctctcctctcctccgccttcctctgagcttttgccactttgttttgtgttttctccatcgccttcgctctcctatcttccagtttcctctgcatccacatatatgtatcaatcgcataatctattattccaaagacaacatcgacgtctatttagtcagtcttttggatagctttatcacatttcaaatatttgatatatcaccaccattcaaggatctatcgtttatttgtgtttctgcttttttttcaaataaacccataattcttacattttgattttttttttttggttggataaaatatgcattttataatttgtaaaaaacgcttgtccacgtttatcgtttgcaatttgaaaacgttacatagtttttctaaattattttgttatacatgtaaaagcaaacagtttcaagaaaagcatgttataagtcatcttgttctcttaatcgatcggatctaactaagatattcgtaaaatagaaaaaaatgagtcacctcgattttcttcatccaagagttagctctatgaacctgctcattcaaccaaccgttaataacggcgtcttgtctcttaaacctattattaatcttagccaccttcgccgtttgccacgccgttatctttgcttccacctcttctctcttcaccctctgcaccgaagcagtcgtcaccatccggttctgaccacctgatgacgccaacacaatattattctctgaaccgtcccggttgttgtaatcgtccggtacaatcgcccatggatttgaatcctcctcaggcacctgaccatgatcaccaacgtcatcgttttcgccgatcctagtcagctcgtttctttcatcacgtatgacgtcacgatgaccacctgattggttagttccgttactgttgttgtccatggaagatccggcgatgactagagcgttgaactctctgctcacggtggtgaaattctcaccggaagaagtagttccgtcgctaaaagcaatagacctcgacggagacaagtatcctcctcctgatcccctttgttgtggccgagtaagctctgtcgtcgtcgtcatcgcgtgaatatctctcacgactatctccgacgacggcgtctcatcccggcgatcggaagcatcggtcgtacttgtggtggagttctccggtgacctttcttgaccgtacaaagtcaacatcagaagagttgtagtagtagtagtagtggagtgttgtaattagctagtttaggtctgattataattaggtgatggaaggagaagaaacaaggtcaggaataaataatcaatgattaggttttaataattcgtgtaacgaattaaaacgtttagtttacatgagaggcaaaattataacaagtgtaaagtcttttccatgaaagctacgttggtccagtaaatgtgccactacatttatgaagacgtgtgtctttcaagatatttagcaagacattgcttattttaattgcttgttttaatttttgaaactgtaacataaattcggtacaattttttttaatatttgagagcatcgtcagagatctttaattagaaaatactgatgaagatagaaaaatagatatatcgtagtgagggaagtgtcggcaaaataggaccgaccacgaaaaatggagatagtgcttttgacacgtgtcttgttatagcaaagattatctacgtggcattaagtgagtggtagtgtattcccgcgagaagaagctactcacgtcagcttcatgaatgtgctcggaaatcccactggacagacgccacgtactaaattgcatatcagattatattcgttttactaaattgctaattatattatttcttgtcattttctgattactccctaaattggtgttttgtttttcttaaaaaagggagagaggttgagttaaatttattctccgaatcaagctccaatgatagtttgtgtgtgtaacaagggaagggagagagagcagaagctcaagccaatataaggccgtaatggattacacaaaaatgggccgttgtgggctactaatgatcacattttctttagagcccaatcaagtagttttgaattttgatcatgtcatacggctagatgtgtttttcttttggttgacatatcgtatagtgaaattgacgtatacggtattaccaataaacaattaggattgttagaaacttgtcaacgtagaaataaaaggttcgcacgcttgattttaggaaacgactcgaaaactaacaaaattattgacactatgtggtagtgacgtcggaaacacgtttaggttagcatccacgagaagaccacgacctagtccacgacgttgtcttatacatccatcaaatagtcttggacattatctttctggtttacaaaaaaagagagaggcagtaataaatcaaactgaaatgaaatcttacctggatcactttggtatacaattctgttttctatgaaatatttgttcttaacttttttcttgttcatctcctgtaatcttattttcatgatccgaaaagtttggttttaggccatatatccctgaacatgtttttattttcaacagttaccaaaattttatcacggtttttcaaatttatataggcctaactttttttgtcttaaatttggtgcaagacgtacgacttgaactatttttcctatgtagtataaaaaatgcgaaacaaccaaactaatacataaaggacctatgccaatatatatacatgattcctgttgagtccaaaactaatgaatctttatatggaatcaaatttcgaaagttcaaacacatataacctccaaaaaaaaagtgggattcaattcaaaaatgaattagccaaaagatcataatttcgtgagcctccttgaagtttggattccaatattttaccaaccacacactctttagacatgtgtatttttgtattgtaaggtcgatttgttggctgtggaatttttttgggtgtaaataactaactcttaatatttatttgagaaatttcatatactaagaaaataataatagttaaacctttaagattttttttgaataagaattattttagtgacgttaagctttatttttagaaatgttagatcggttcagcttttgtcttttactgaattgaatactttaaaccaagataaccttcatattcaaagctcgaatcagaccaaactgagttgacaattcatagccgatgaaattcatatagcatggtttatacattgattcttaatattctttacccaaatggtcatagtggactcgtctttgtacaaagtattggaataacgcaaaagagaatgttcaaaagagatgaggacaaaaaacccaattgatgtccttatccactttccagtattcaaaattgaaggattgatgttttggtcaaaatcatgtcttgtttgaatacaagtttgaatttttggggacaaatcccatgtttctaaccaatcccatatggccttgtctatacattattggctcattttcacatttggcgtaacctaattaaatattgacctcttctttacgttaaactcactgtaacctttttgttttattcgtctaaatctctttcaaattttaccacttttggcttgttatccagaaatcatatccatgtcataactttgattaatcctcgtatgagtatgttttatattcacttagatctgtttgtttgataaacacaaatattccatttgcataatagttaaagtagatcttaaagtctcataattagttgagatttttttttcaaatggtgcggtctcataatcagttgagaattttcatcaaatcattttttttaattatacgtaataacatcttatttcaaaaatccttttcaggattaaagacaaaattatgggaaaaaggaaaagactaaatcaaataaaaaacaagagaaatcaataaaattatagtactccctctgtttctaaatataagatattttatctaaaagcacaaaattttagaaaataatcaatttcttttgtttttataatttctacattgaaaacataatttagtattaagtcaaagagagtttgagcagtaaaaaattactgtagaatataaaaagtcatataattctaaaattttaatttttgcgtaaaaatttaaattttttatccaaaacatcttctaccgtgaaataaattaaaatggctaaaaatctcataatataaaacaaaggaaatagtaattatcacagaatacaataataattacacataatttacgacaaatcaaaattaattttctttttaattaaaattattgtaatgcatcaaaattaacaaaaataaagaaaaagatacgatgatttttcttgaagttagcaccacctaaatttcagtttgttttatttattaaaacaaaactgagattgacgtggtgaaaatttcataaaaatcttaaatattagataatgtaatttttttttacatatttatatttttaatcatcgaatataaaaatatttggattgattatgttatgctattagttgaatattatcatttttatttaaaatttatacaaataatgaaatattattttcatttagttaattctataatattaataattaaagttattggttaaaataaataaataactgagctatcattgacttaaaagtaaaataacaaatctatttttaattttaagagaaaaaactaaaaaagtgttgactgagtaaatttctgggttccataaatattgatgttttattgtatttaataaaatgatgtttttcatttatttgttattatcttctcttccatacaaagaaatatatgtgaatttcatcccataaattaaagttttctacttaaattattcgtttttattatattgttttctattgaaaataaacattatattaagaattaaataattgtattaacctataaagaacctccgagatttcctagaggtagctttcctcacacaccgtcacggccgcttgtctccaagttgtcttgggactcgtcgacgatgcacacatagtatatttatatattcttctcctagccgaaccagaaatttccagagagataatcaaattcaattgcataaaaactgaatcttgttgttgaaaaagagctctcacaaaacttgtttctcaattctctcctttggccctttttctcacaatctgcggatataaatacgcttcttctcctccgctaattacccaaattcgatcctaaagctctcgtctttcttcagcgttttccggtgttcatattcgaggtaggaaaaaagggctttgctttgtgctgagatctgttgttcatctttctaaagttttgtgtttttattttgatgaatctgctgcatttgtttgactgttttctgcagaaaaaaggttcaaccttttttttgtttgatatgagatttagagaaaaagtaagttaatgttgttgtttgtttattttgatctcttatttgtgtgccattgctcaggctgtgttgtgtcttcttggaggcttagaaaatctctatggtgagcagttttttggcgcgattcacttcgttgctcttctttgttcatagatttctcacatttgtttgttgttaatagggagaagcaccagctttctttgtggatcatctggagaatggatacaccaatggctttggtgtcaaatccgagcctaagaacagagatacatctgtgcttattggggatcgatccgtaagccccccaactttgatggtttagaatgtgaaactgttcttcatacgtcgacatttgttttgatctgaggtttatcttttgcagtttgtgattggtggaaatcatgaaggaaacccattgttccttggtgttcagattcatgacaaagtcactaacaagtggtgtgtgttcattgatcattgatctgttagtttgttccatcggtgtggaattttaaggatttgaagtcaatttgtgttttgttgtccaggtccagtcctagtgttcttggaactggccctaaaccctgcaagggttactctgccattgttcttccaaaaggtcggattttggttatcaaaaaaggctcagcttctgatgactccatttggttccttgaggttagtatatggagaaaaatgatattgattggtgttgtgagtgtagagtttttggtgttctcattctcatatgtttgagtattcatataggtggatactccttttatccgggaacaaaagaaattgcttggaagagaggttgttgcttggagtaaaggagtaaggggaaatgcagagaagcctattgttataagcggtccttctggagttggaaaaggaacacttatatcgatgctcatgaaggagtttccttcaatgtttgggttctctgtgagccacacgactcgagctccaaggtgtatggagaagaatggtgttcactaccatttcactgataagactgttatggagaaagaaatcaaagatgggaagtttctcgagtttgcgtctgttcacggcaatctatacggaaccagcattgaatccgttgaggttgtaacagattcaggaaaggtaataaaaagataatatttgtaacatcaatctctttcatgccgttgatccatcaaatgatcatatattttggtgtgtatagagatgcattttggatattgatgttcaaggagcgaggtcagtgaaggcgagttcactggatgcgatattcatattcgtttgtcctccttcaatgaaggaacttgaagatcggcttcgtgcccggtaaaaaccagacattagagttgtttttttacttcagatttttcattgcaagttctcaattttaagtgctgaaaaaacagaggaacagagacagaggagcaaatccaaaagcggcttagaaacgctgacgcagagatcaaagcagggaaatcctctggcatttttgaacacaaactgtataatgacaaccttgaggaatgctacaagacccttaaggtgacttaacctaccttttatttatgaataaattcctgttaaacctcatccatttcaagcaacaatggctgtctgtttcagaatctcttggggattaacgaccttgctcctgtgaatggtgtagaaggtaataaaaccaaagagtagacacaatgtatactaattaagtaggaaaggaagtctgatggattttgtgattgtttgataaaagcagtagaagggatcaatctgcccaaggagcacacagtaacaaagatggatgacaagattttgattcaagaaacaggagaaggaaccaagaacaaaatgtacacgatcttagccaactaatgttctttcttatgttatccagtgtagagtttattaatgaaacgtcttttggtgggcaggatcgtgttggatttatcttcaatcaacgggggagcaccgggaagaacaagagggatcgttctggacacggttaagtccagttgacaatgagtctttttatttggctgcgggaaagctgaggaaacatttagacgatgatgatgaacattgctcgttgttttatgactgtggttggaaggtagtgttatgcgatcactagataggcactgatgatgatgattatgattatgatgattcaagaaagtcatgatctcttatgagagatgatggaataaggttattttgttctttttactgataaagattttgtttaatttaaatcttgaaagaatccattcttttggtgtttactaggacatacaaagtaccaaaaaaagttgaaatctctgcaaatgtttcttgagattcccctactggaataggacaaacaagaaacttaacatcgaaatggggatgatatatttataaaattgttcccacacaacagtgtttagtataccgtacaggactcaagatcttcttggacaaaaagatggcagttagtaccagtttataattgaaaatcagccaataatgtaaaagaaaagcatctcaaacagagaagaataagacaaggctataaaaaaagagaccaagttgtgggactttggagctaaaatgggtcatcgaaagatagcaagttgtattgattcgtgggtccagtgacagtgtaaattgaaggaaggttcgtagtagcccaccacagcttaaaataattttcttaaaagattgtgcacttaatggttatggtacatccctctcacgtcctactcaactacacacacttgtcacgtgacagtgtcacggtgacactctgtaatctgtacaattaagtagactgacgcgtgtggctttcaagcgtaggtaaaagtatctcttctggggccaacccaaatcctgctacagaggtctcgatataatgcttttgatgcagcagattctggttgggtcagacgaataatggaaatgaagctatattgggcctaaagaaaagcccaaaaacagaattagagtccaactaactgactaagcactactggttgacctgaaagccgtagaacaagaaagtctagtgagatatgctatcagatttcatacagtttcagttttaagaggtgaatttcagttataaaggtgtaagaagacaagaaaaagaaaaaagaaaaaaaggtgtaagaagagttctttgcacctaacatgtataaaccaaagagctttggtaacaattttcgactgcataaggattagaacacaatctatgaggggagtcttagcttagctacaaataaaatcacgaactggccgaagcatgaaggatctgaaaatgttctgcgatcctagtaatactataccaattacagtttaacgggaaggatgttttagcctattaatatgccaagcctgttcctttggatcagatagtttctttcaaatagataaagatagaagcagtgtaagaagaaacagagctaaagaaatgttaaagaagaagatttactcaaacagagctaaagaaatattttgtgtacgaagaaacagagctaaacaaacaaacaaatgagaaaaaagaagcaactatccttagaacagcttagtgtctccaaaaatataactttttaagacgaatgatattcatgagacaacaaagctgcaaatgctaagatgcaaacaacaaaaactgccaaaaatcttttcaaagactaacataagaaatgatcataagttcatagcacagatttgacatcctaatgaacaaacattggataaacaatgtaagaagaacagagctaaacaaatgagaaagaagaagatttactaaaacagataatcctaacttttttaagacgaaggataatcatcaaagttgcatatgtaaaccgaaaaaaactgtcttttaaagactaatataagaaatgatcataagtttaaagcacatatttgacatcctaatgaagaaacattggcattctcaaatacaaaaaactcaactttgatgatcacccattacagcaaacttatccagtaatcatagttccagctccttcatcagacataatctcatgaagcaaagaatgttgtctccttccatcaataatactagcagtcttaactccttgagctagagaccttatacaacacttcactttaggaatcatcccaccagcaactttcccatcttcaatcatcttcttcactccttttatatcaatctcctttatcaaactacttggatcctctttattctccaagattccagccacatcagtcagcagaatcagtttctcagctccaagcgcggccgcaagctctccagcaactgtatctgcattgatattgtaagcttgaccagaatcatcagcagcaacagaggcaatcactggaatgtaaccataatcaacgagcggacgtaacacagatggatcaactcttgcaacttcaccaacgaaacctaactgagctgaattgggaacaggtcgtgctgtgagaagacgaccgtcgtgtcctgataaccccacagcggtggctccggcggcgttaataagagaaaccagattcttattgacctttccgactaaaaccatagagacgatctccatcgtcgttgcgtcggtgacacgtagtccgtcacgaaactcagctgggatgttgagttgtttcaggtaacggttgatgtcaggaccaccaccgtgaacgaggatcggacgaagaccgacacacgcgaggagcacgagatcgcttacgacggaggatttaagttccggcgaagtcattgctgcgccgccgtatttgacaactatggttttacctcggaatttttggataaatggtagagattcggagagaatctcgactctgtaatccggtgaaggtgcatttccggttgcgattgaaggtggtgttgatacggtggcttttatcgagaaacctagacggtgatggttcttgttgcgagttggataacagagagatggtgatttgttggggattagggttttgaaaggattggaaacagtgaaggagaaggatttaggtgaagcattggatgtgacggtggccattcctgaaccttaccggagaaggaggaagcggcggcgaattagctgaagcgagatggtctctcagatcttcttcgacgattttagttaaacaacaaaatgaacaaatgattaatgtccacgtggagcgtagacacaaagatgctgtcctagccctaagtttaaacggtgacgtacttgtgaaatacaaaacgctgacgttgttgttctgtctctttttgtacttaaacgatgtcgtttcatcttgtagcgggaaataaaacagagctcaggctttttttttttttttttctgttcgtcgtcgtctccgcgagattgctacaaattagagtagagagtaatttcaatcagcaataaattaaatacctggaattgctgattattgagagggaaatggaggaggaattgatacgaagatcagaaccggagtctctagtctccgtcactgtagctaggttcatgagtacgcttctctcagctcgccctaaaaagctacgagagtctatttctcgtctaactcctgattctcaaaagggtgtctcaggtaataactgttttcaatttcaattttatccttaatctgtgtttatttatgtttacacatgctcttttggggtttataatctgtttgttttcgttaggctctatcgatgaggcactctggtttttggaaaagtgcgttatagacgctgctgagagagacgaagccatgagtgaaattcttgtacccattatcgaacatgtaatatcttaaaccctgtgaaaagttaaaaccttgcttgattgttgtaatgtccggtcttttatcttgtatgttcttacgtgttggtttctctacttttgttgttgttttttagacattaaggtttaaggattctaagcatggtaacccagctatgatacttctaaattggctatttcaagatgaagttctctttcaagccgtttcgagaaatctttcgaatatcattttgaggaacgaggacaggtttttagcgcttggatggtgtttacttatccgacgtcttgtagaatgtgaggatactggggatcaaggtttttggcatggtgagcattataatcatctggctatctctattgaaggaaagaaaacgctctctttacttatgtacttgtataaatttttttgttgacaggaattagggagaaacattctatgtttgtggagattgtttcatcttgtgtgcctcacttgttgatgattgtacgcaatggaaggtataaaacttctttgtcaatgggtataaatatcatctcctgctctctattttttgttctatatggagcaagtttgtacacttacatacatagtcatttccactttgttctgagctgttgttattttgtttagtattttacaagatggatatgaggtgccatctcgtctttctctttctgctgctgattgcttgctgtcaattactggagccttagcaaagagggataatactctgatcaatagaccaaagtcaccaaccattacggggtctcatcaacctgttgctttgacacctaatattagtgagaaaaaaaaaaggccgacttctctacctgaagactcaaacattgagacaaattgtatactgtggaaccacatggaggatctgacacgccttgtacaatgtctttttgctgtatgttcgctgatccatctaaatatgcttgagctgtgttctaaattttgaagtgacgaagtaatccatgatttgagtcgagtaatattgacaaatgattccttccagtggaacagaaaaactcgactactgcatgcgaaggggttaagtcaagtgctgaaatggttagaggagttgaaagagcatcatggtggctcccaaaaggaggcaggtctctgactgatgccgcctttccttgttcatttccgttttctgtttctgtttttgattcttgcttttcaaattcattgtttaatacctggatttcaggcacagaggtatctatgggtggagctctactgctctcttcttgttggaagcattacagtgtcttgctccacatggaagatcaaaagttctcaaagattagtaaggaattgttggagcaatatttgtctggtattaaggttagaaattgtcgccaatcttttttggtttcaaaattttgtgatagagataaatattacatacagtacctatgggtttctattgtgtccgtatctgcaactgctgcatatgtctaagtcctctgagtctctgacccaattttgtctaagaataagtttatgtcatcgccatctacagtttctattttttattctttgttaaaaagatagatatatccagtaacatttagtagagtcgcttgatatttgatgggaatgtatttgcatggtatatgtatttgctctggagtcttttgtttcacgcagaaaatttatataaaatacacagagacaagttgtagatgttatattggtaaagggctgcttactagctttctgttttagttagtgttgttcaatttgattgggtttgtaagaagctaatagcattaaaattataagttatggagtactgttttaatgcttctctagctttctgctctttctcttattattagtgttttcctaattgattgggtcatcaggaaactaataatgataaaaatgatgcagtattattcagaaagttatcctcagggatgttcggacaccaagaatggtggtatagagacacagaagtttttcttaaactgtttatgccttttgttgggccgctttgagggaaagaaatttgagagcatactatcagagtatggaatgaagctcgtgcctattcttctacatcaggtatctttcgctattgtttattgaataggggagtgatgacacactttacctgaagttctcttgtagttatattggttgttctgctagttatgctagaattcatttcttatattggcttttatgacttcctgctcaactcataattttgttctgctcaattgattttatgattctaacatatcgtgagaaaattaatcttgaagggttatatatatacacccatgtgatcatcttagtgcttacattcttcctttgtattcgaagcttcgcagtaacaatgaagagatatcagaaggcgttgtggctatatttaaggcagtcttctttaaattacaatctcagtccggagacagcttctctgatacaatgtgcatggacgttgtgataccatcactgcttcaccttcttgatgaaagggatggcgcggccaaagctgttagtgtcctgctggcagactattgttccaagtatgtctattctctttccttttggtactaaatcatgttagtagctttctagttaccagtgacggtacctagtttgtctctgacttaaagaaacattcaccagaaatgcaggtaatagctgtctcagtgaaattctacaacgccttgcttctggaactactgtgcaaaggctgaattctttggatgtgatatcagaagtaatccttatgtcaaaagattcatttccttctcatataccctggtatgcaatcatttatgtttttcgtcccaattttctatttctagcttttctgtatcttctttatttgcattctcatcccctcagaagtcagaatcattttctgctcttatttcaggaaagagattgcggactgcttgttaaagtgccttgatgacgaggaaacatgtatctgtaaacaaacttcagagttgctgaagtcaatcggttggtcttcttttagcctttatccgctattcatttggaagcttttgtttgtggccattattaatttctggtattggcagtcttatgtctcttatgacctctaaatatggcctttcttcatttgataagatgaattttgctgataataatcagtgttttgttaaaaggaggatttctgttaattattcattattcagatgagaaaaacttataaagatccaatttatggggtccaaaacttgttattccatattgcaatggcagttatagttcatattggataacatttattttctgctttcctatataatgaagccaatcaactgaatgatttttgttatcgttttttcttccagagccatcatttgtgctaccgaatttagtaaacctcatttatgcacccaatggaaaagtacaatcatcagctacagaaaccttgcttggggtcctgaaacaccataaggaggattttgatgttatatgtatgttgctgaccagtcttaggtatcgtgctctgtctctttttctcctttccccattgtatacatagttgtttgtttattcccatttaccctaagtgagatgtgagaatacactggattcttaggtcaagtttgtaaaagtaaacttacgaatgctcatacgtgaaaatattgacctgactacctggtttggtttttaattttggttttgcattgtatcaagctaatattgaaaaaggctttctgcttttgatctccacttttctcttgtagtaatatccaagctttggatactgcagaaagtaatggacattccactgaaggtatttggcttcttatttcattaccataggctacatgcgatacagaatctgtgttaaaatttgtcttatatatgtacaatccgaacgtattatataaaattattacaacacttcaaatttaagctggataagaaataaaattactggaatgtgaaacttaaacgatgtgaaatatgaactagtctggctgaattacatagcggacactatcaagttattcttggtcaaggcatgctcatcatcttcttgtactgttacaggtttaacttttgacagtgatcgagtgctaaagctgatcccagagtgggctagaagtgtaagtacaagaatacgtcatgcttgctttgctatctttgaaatcaatccatttttgtttctaaagtgcatgtataggcaccatttacgaactgttggtgcactactgaatagaaaatggtaactgaactattaactctgaaccttcaacacaaactttttcaggcattggttgtcccttttttcccttccagtactatttccttttatctaattgttttcttgtgtatgtgctgggaaactcttcgcatgggaatgaccaaagtgaccaaagcttgtgccagctataattaggcaattagaatatatttctgcctgttgactgaaatcaaattcttacaggtacaaaactggaactcactgatcggacctttgcttgacaagatgttcttggagccatccaatgccatcatggttaggtttcttagttgcatcagtgaatctttggcagatacgtcggacttggtccttccgcatgtactttcacatatgaagaagcaaaacaagtaagtacaatacgtaccataattgtgatttctgtggtaagaaaaactttcaacgactcccaaagataaaacaatattgattatctataatgtcaattctaatttagggtggatgcgagcttcatatccagatctgatactaaaagttcagttgacaaaactaaatcggagaaatctctatttgaccacctttgcccactgcttatattaagactgcttccccaaagagtgtttgatgatattgattcttctacaatttatggtaaattcctcagcggggactctgtgaatggtaagtatgcttatgcctttggttttcttttcctgataagagaggattggatatttatcataaggtcgtttgatccttattctcaattagattcaacgctttagctatattttcctaagcggcatgatcaagagtagatactgacaatcttagacttgattcactacatctatttcttgtcatgtgttacttatcagactaccaagacatcaagtttgaggattgtcaatgcattgctactttcattttggaaaggttattttactctcagtgatcatcaaatacaatctaccctaatacttattttatatctagcgaactaactctagtaatacagggcattttctaagtttgaatttgaagaagttcggaaactctctgctgagttatgtggacgtctccatccccaggtgctaattgactaccttccttgctcttgtattgttggtcaatcttgtctaaatgtttatatatgttttaagcctttgtttcaaagtaaattttatataccaagaaacaatggtagattctccttaataagttttctgtcaagttcactgctatcttcatgcgaaagcaaagcacatgcaaaattttctcccgtcataactaggttctgttagtatggagaagggcttggtgcattttcttatatctgaaattttctaaatgcctacttcagttttacttatacaacagtctagcctactcttcatcatccaaatttgtaatatgtcggcacttttactcaacaggtgctatttccaactgttttattgcaactcgaaaaggccacagagatacaagacagcctcaagattaaagcttgcctattttctatatgcacatctcttatggtaatatatttaatttttcgtgtccttaatgaacatattctgtgatccctgttgtcacttgttcgatgcactatcaattggattagttttgtaaattacaagttttccgtcacttgcaggtccgaggctgggagtctctctcacacagagtaacacctaagatcaggaaagtcctggaaaatattttgttatggccttctgttgaagatgaaagtaagacaccggctagtggctattgatttatatctcaagctctgttacctttcacttcctcacttcatggctgttatttttccttacagtttccaaagtacaacatgggtgcattgattgtctggcactgatgatatgtgctgaactgcaacatcttaaatcttcaaaaacatctggaggagaaaaaatacgttcaacagggaaggacacatctggttagtattgatgttgtctaacaatagcttttccagacttgtgtatacattgtatcctgatctttaggtgttgatgcgtcaggttattctgtcctagattacactatccattgtttaatagaagaccgaagtaactgctcgtctatcccaaagctgagtactgatatcctaacttgtgaaaatcctcttcctattccatttcgtctatgcatggcaaatgttatcatcagtgcttgtcaaaaaaaccctgagtcttccaagaagacttttgcccgaaaagctcttccgcctcttattcattccctcaaggtactttttgactgcttacactcatttcggatttggctaaatttgtttgcattttgtttagttttcaacaaaattccttaattttgtgcaggtcatatctgtaccggaggtccgtgcagcttgtatccaggtcttattctcggccacatatcatctgaagtccacacttcttccggtttcatctgatctgctgaagctttccctgagatttcttgaacaaggatccgaaaaggtaccagaaatctattaaacttatttctaacatgtatacaatggtatggaagtagacaaagagcttcacattaagacatgaaacttcctttctcaagtgactactgtcgacatttctgaatcccacaatccatatccgaaactgtctgcatctatccacatctgaactcgaatatttatgactgccttgaatttaaggttatgcggaagtcaaacattattctcttgttgcgtaggaaaagctggctggcgcaaaactaatggcatcactgatggcgagtgaagacgtgatactggaaaacatttcagagggattgctcgaagcaagatcagttctgtccaaagcatctttgtcagacccttctcgagacgtacgtgaagtctgcgctaagctattggcatgcataacgccgttgtaaagccatttgttcttcttcttcttcttcttttttgccacttttggtttgttctcgcgtgccaatgaagtcggtatgtagatatgttgtagcaaacgatggcctaactataatcttatgtaatatgcaaagaccaaatacgttttagtaaccagttatggtgaacctgcagctaccattttgtgttttctgaaactaagtcttgactttttttaatttgggaaagatcagattagaaactcaaatcaacaccagtccactctctaggttagcaaaatactcatacctgttctgctgcgcttgttcttcacagatggatccgagttgcagagacctcaacctgatgatggtaacaaggcaaaaaatgtgctagagagagacagcatcaaactctacaattatgtatgttttattgatttagaactgaagagatggaattatatatgaaaactagattaaccaaagatagtcaagaggtacgtacgattttacgagtgctagatttgactcgcacagacttttaccaacgcctataatactactattaactaaagaacataaacgcatagatgacatgccctatggcttttttcttattccttgcctcatcgttttactctcttataatcttctcttcttcttatgtcttcatcttcactgatgtatctttcatttcttctccctactcacaccatcatcataccacttccccgatgttttcaggctgcactaacttttgacagcaggggcagagactcttgacatgagaaatgcttgacttgagttgcttcgcatcgtttagactaagatcctctacatagtcaacataggcaaaaacttcaccacgattctcaacctcttcaagcttagctccaaagccttggatttcaacagtttgcagagttttcttttcgggattgaagtagaacacatagtacggtttacatgtatacttcatacacaagacaatatccccagtagcagtcactccagcaactgaaaattcgcaggaagcaaggacttcattctcaggcagagtgtagacatacttcacccattccagtttctcaacatcctctagaacccacagacacaactcaacggtacgtcttccaccagcgtcaacacagttgcaatcagtcacacctaatttacccatatagttgaccaaactcaatctagtaggatcctttagacgatcattaaagcgggcagcgtcaataaacttgaactcctcagaactaacatcaaagcgaactatcaaaaacgtcaatccaaaaactgtttcaactaagacagttttagctaagtaatacaaaaccccattaatgcatatcccttgattcgaagaacaacgctcatacagaggacaagggatattcttttccctccacttgagttctccagatcctaatgttagaatgaaatgagtatcaaaagccttgaatcgcttatcaacgggatcaaacactaaaaagcctcgagaccttctgtccttcatgatcacaggtaagcccgtatacattccggtgatagggttacaaatcacaatcgtctcagtatcaacgatatgcacagcaggaaaatagagcaaacctgaggcatagctacaaatgtagtggctaacatctcctgagaacttgctatgaaactctaaatgagctgatttctcataccgattctgtgactgaggcgatgagaaaaattgccactcattacatttgtatcgttcaacagcaaacaagagacgtggacgattcgaggatctgctcaggaacagcttggtgaaatcagtactgcgaagtatagacgcccactgcttggacagtgtacgaaacctagccactgacttcgaaggcaatctcgcgaagatctcgcgaatgagatcagttgggagtgatacattcatttttcctctatccatcggattcgcctgagttcgtgattgttccgccggagaaagaaagggtttggggctacgacgacgacaggttggaatttgtgactgtttattttgttctttctaaattcgtccggtaaacgaaagaaatagacatactttatagattgtgtatgtgagtctgttggaaaaaaacgcagagttctctttcatagcagctcattcagaaagataagtttcgccgatctcttgccgtcccaatcagaaagataagattcgccgatctcttgccgtcccaatccacttggggttaaaaacttctccctctacactagttctgtctgggatagagtggatccacagtccgaagatttctccgtgttctgtcggctttgttgctagtcaaggttgtttcgtggtttcatccgtttttcttctttgtagaagtttgttttcagagtagttcagttctatcaagctgtggtgtagtctgtcagttcagttggttttctcgaagtggttcttcttagaaaaggtcagggtcttgctcatttgtgtatcatgaatctggatttggataaagccatacaagaattgtccatcatggaggatgttcctctgattctgcctaatcaagaaaaattttgctcaatagaaaggaataactgcagtcttttaggaagatttctgaacccttctcatcaaaggatgtctaattggatattggacatgcccagaatctggagactttactcaagggttcgaggtgttgcgctttcacaagaaagatttcagtttctttttaaatcggaagatgatttacttgaaattttaaaaactggagtttggactcaagatgaatggtgtgtgataatggatcgatgggtggagaaaccaaaagaggattatctgatgtttcttcctgtttggattcgattgcggaatattcctgtcaactattacacatctgatacgattaaggagattgcgtcttgtgttggtaaggttttaaaagtggaattagacttagaaaagtctcaagctcaggattatgtcagagttcaggtactgtttgatgttcgaaatcctttacgaaattgtaaagaggttctgattccaactggtgaggttgtctcagttacttttgattatgaaagaatcaggaagaggtgttttctttgccaacgtctgactcatgagaaaggtgattgtccgttttctcagcaaagaaataaatcaaattttgaaaaaattatcagagatgcaggtttaaagacaggagaattagtttcagaaactagacccaagattctatctcttccgtctccctctatggttcctgttggaagtaatgaaaatagggatttgtttaactggcagagagagaaggatgctcaggattcttctccttatccagcctctcctgctcctttgaatgagttatctaaggaattacagagaggtctttttccattcaaagctaaactaaggaagagtcatgaatctgaagctttgtctggatttttggaaatggatttatcttctgatcctaaaactactttagaggaagcaagttcgtcagggttaagtattaggcagaaaaatccaagaaaaaggaaagtttacactttgagaaagaagtcacttggtagagaagacttaaatcttccggatgcaaatttcatcgttcaaggtgacacagatgctaaaagaagaaatcaagctgttggttctgggatttctcaagataataagggtgtggactctacggtggttccttgtgaactgccgcagtatcaatagggcgtccttagttggaattgccaaggactgaggaatccttggacaattcgatacttaaaggaaatgaaaaaagatcattttcctgatattttgttcctcatggagaccatgaattgtgatccttttgttatgaaaatctttacttggcttggatatgattattttcacacaatagaaccagaaggcaaaagtggaggtctcgctcttttttggaaaaataacctagaaattgagtttttgtatgaagacaagaatcttttggatttgaaagtgattcaaggttctcaaagttggtttgtttcttgtgtgtatgggaatccaatggcaagtctcagatatttgcttttggacaagttatgctctattggtgaattcaggaaatcaacttggtgtatgataggtgattttaatgatatcacatctaatcaagataagttaggaggcccttctagactgtcttcttcttttcaaccattcaaagatatgcttagctggtgtgacatgcatgaattaggaagttcagggaatagttacacttggggaggaactcgtaatgatcaatggattcactgcaaattagatagatgctttggaaattcggcttggttttctatgtttccaaaatcacatcaatggtttcttgaaaaaatgggttcagatcataggcctgttcttgtaaagtttgtgaatgatcaggaagtctttcgtggtcaatttcattttgataaaagatttgcagatgatcctaattgtgcagaagctattcgttcttcttggaatgagattgtttcttcagaagtgtcgtcatcaatgatgggattagtggagtgcaggaaagccattggtaaatggaaaaaggggaataatttcaatgctcagaacagaataaaatgtctgaggaaagagctggatgaggaaaaaagttttcagtttccttcttggcctaaagtctcagtgttacaagatcttttaagtgctgccttttatgaagaggaatctttctggaggttaaagagtagagacaaatggttagatggaggtgataagaattctaaatttttccaagcttctgtcaaggctaatagagttaagaactcactaagctttttagttgatgaagaagggaatgaacatactgtagctaaagagaaaggcaacattgctttaagctttttcaaagatctctttacttcgtcctatcctgctaatatgcaatcaatcttacatggattccaagcaagagtcacttctgaaatgaatattgacttgactaaagatgtatcagaggaggagatttacaatgcggtattctctataaatgcagagagtgcaccaggtcctgatggtttcactgctctattctttcagtctcattggtctttagttaagaagcagataatggaggacatcttgggcttctttcaaacgggaatcatgccagatcaatggaatcacacacatctatgtttgattccaaaaatttcacccccaagaagaatggcagatattagaccgatcagcttgtgttcggtattatacaagatcgtgtcaaagattctatctgctcgtctgaagaaacatcttccagagttagtctccccaacccaatctgcatttgttgctgagaggttagcttctgataacattctcattgctcatgagataattcataatttgagaactaatgataagatttccaaagagtttttggctttcaaaacagacatgtccaaggcctatgatagggttgaatggccttttttacaaggaattttaacagctatgggctttaatatcaaatggatttcttggattatgagttgtgtgacttcagtctcttattctgttctgataaatggtcaagcctttggtaaattgtttcctgaaagaggtataagacaaggggatcctttatccccttttctttttgttttgtgcacggaagctttggtgcatattctaaatcaagcagaaagagatgggagagtaacaggaataaggtttaatgaggcggggacttcaatcaatcatttattgtttgctgacgatactttgataatttgtaaagctacaaagaatgaatgtgaagagcttatgcattgtttatcagagtatggacatatctcaggacaagtgattaacttggaaaagtctgctgtcacctttggagccaaaattgacgaggacacaaaagattggattaagaatagatcaggaatccaattggaaggtgggtatggaaagtatctgggactaccggaatgcttaagaggttcgaaaaaggatttatttgagttcttaaaggaaaaattacaggccagactcataggttggtacgctaaaactttatcccaggggggtaaagagattctattgaagtctattgcgatggctctccctgtgtatgcaatgacttgttttaggctacctaaatctctatgctcaaggttaactggtgctatgattgacttttggtggaattcaatgcagaatacgaaaaagattcactggattggggctcaaaaattaattttgcctaaatctctaggaggttttggttttaaagaccttcagtgctttaatcaagctttattagccaaacaagcatggagaatctttaagaatgaagatagtcttttgtccaagatctttaaaagcaggtatttcctcaatactgatttccttaatgcctctaaaggaacacgtcctttgtatgcttggcagagtattttgtatggtcgtgacttattgcagaagggtttaaaaaagattattggcaatgggcaacaaaccattgtttgggttgataagtggctttttgatggtctgaatagaagaccttcgagtattcattctttgatggatattagcatgaaagtgaatcaactcattgaccccatttctggaaactggaatctgaatcttatgagtcagttatttccttggacggatattctgataatgcttaatcaaagaccgatggtaaatcgaaatgattcttattgttggtctggcaataataatggcatttacacggttaaatcagggtatgatctgattagtcgacaagctcatcaaaagatttatcaagaggctgcagtgaacccttcagtaaaccctcttttttgcagtatttggagtcttcatacggcgcctaaaattaaggtcttcttatggaaagtcttaaaaggagctgtagcagtggaagacagactaagaactcgtggtatcaaggcaatggatggatgcttaatgtgtaatgaggagaatgaaacaattaaccacattttattccaatgtccattggcaagacaagtctgggcgctgtcccttatgcaatcccctgaaaaaggttttggatcttcaatctttactaatatggaccatgttttgaactattgtcagaaactgagtagttctagtaatgtgagttatgttagtccttggataatctgggtcttatggaaacataggaataaaattctgtttgagggagttacttctgtgactcaaagcattgtagacaaagcttatgtggattgtaatcaatggtgttcagcccaacaagatgtctgtatcaaggaatcaaagtcaaagttgaattggagtcctcctcctcagaatgagattaaatgcaatattggtgtggcctggtctaatcgtttacaagcttctggtgcatcttgggttgtgagagatgctctgggaaaggtgttacttcatagtaggagatcttattctcatgttcattctatgttggatgcaaagattagaagttgggaatgggctcttacaagcatggcacaacatcattttgacagagtcactttcagagcctcaacacatgacattattaaagctctctacaaaccagaagaatggccatcattattaggccatacaagtcaactcttgaagttatcacaaaagaaaagtggttggttcatggctttggaaccaaaacactgtaataaaggagcttttgagattgctaagagtgttattactgggcacagatggcaatcttatgtctctcggggttttccccattggctaggaaatctctttgcttccgaaatgactcagctagggagattgtgacagtgttcattggaggcttgatttggttacaggtggtttaactcagattatcaaatcagtcggaggtgtcatctttgggaattagatgctcagattaattgctgagttgttaatcaaatagaatgttaggtgtggaggtggattagtttttgtccttttctaatgattgttttcttcagtcaaaggtttagtaagtttaggatttccacttaggttcttcgagtctagttttttaataatttcttttttcctaattttttcattaaggttagagtctatatattataagtgtttactcctttacgtcattaggtctcagtctttcttgttccttttctcttttcaatcttacctccatggcagatgaattgtgggatgaaattcaaggcctggatctaggtcctgaggatccagccctcttcattccccatgaagcttatgtgtatgttgaagagttcaatcgactgagtataattgcaagacctctcaacccaagagtccaaaacttgaacgcggtgattgcagccttacctcggtactggggaatgacggtgcatgtccatggaagaattctggatgcaacttatgttcaatttctcttccaaaatgaagttgacttgcagtcagtacaaagaagagaaccatggattttcaacaactggttcgtggctactcaaagatgggaacctgctcctgctcttaactttgttacttctattgatctttgggtgcagattagaggaattcccctgccctatgtgtgtgaagagacggctctagagatagcacgtgacttaggagaagtcatcatgctggatcatcatgacgcaacatctactcaaattacttatatccgagttagagtgcgttttggcatcacagacaggctcagattcttccaacgaatcatctttgattcgggagaagtggttaccatcagatttcaatatgagcgcctcagaagaatctgtagcagttgcttcaggtttacgcacaacagagcttattgtccctatagaccacgtccccacagcatagccagagaaagagctgtcttcagagacagtgttcataggtcaagcttgaactctcaatcgcagatgacggagacttcatttcctgctcctgtgacaccgcctcctagaattgctcatccaccactgaatcctgaagaattgagagctgcgtatccatactatgcatcagttagagatactcatacattacatgttggagaatctagtactgcaagacaacaatggtcatcgagttctagtaccactccaacaagagcagacactcctaatcatgataacaacagagtctttgaagtcggtcaatcctcaagaagacaggaagtaagaagagaagcagaggatcctagacttcaaactcgtctacacagtgcttcaagaatgggagagagtctgaaacctcccaaaaagagataaccactctaacaagacttctgtcaatttttgttgaagactacagggaatctaggatagcagcttcaagtagttggatatgtttttttggttctgacatatccttaactttgttaagtttcaggtttattatttcatgtttctcgttttacttctaagatcatcttgttatgtttgaatcaaaggtttgtaagtggttagaccactcaaacactttttgtaagaacacaatgacatgaatgaatgaaagataacttttagggaaaaaaaaaaaaaaaaacgaaagaaatagacagtgaatttgatgggcctttgggctttagcgtaattgtgaatgagctcatttattcattgtcgtaatttatggtttgttctctcatgtgccaatgaagtccgtatgtgtgctagcaagcaaacgatggtattggcctaacttttcgtagagattctataaaattatgtgaaatgcaaagaccaaataagtttgggtatagaatctccagctactttttaaaatacaaaataatgataccagagtacagaaatttaatagacagtagaaattgcactttaatttcgggtagaagatatcattaaactataggaaaaattgattaaccaaaaaaaggtcaacaatgctacaatacgattcacttcaaaatatttgtaatacactaccaaagctagatttgattcatactcacagatcttccaacgtctataactaaagaacataaacacatatatgacatgccctactgctttttacctcatcccttgtctcttttcttccctactgtctctttcatttcttctctccctttggtttaagccttttggtaatgataatcaggctgcgatactttgttacagcatgagcagagatgcttgacttgagagatgcttgacttgagttgcttccctttgttaacccgaagatcctctacatggttaacaaaagcataaactctaccacaattctcaaccgcttcaaggttagctccaaaatcttggatttcaacgctctggagagtgttcctctcgggattgaagtagaacacataaaacggtttacatgtatatttcatacacaaaacaatatcacctctagtagtcactccagcaactgaaaagtcgcaggaatcaaggacttcattctccggcagagtgtacacatatttaacccattcatgcttctcggcatcctctagaacccacatacgcaactcaacggtgcgcctttcaccagcttgaccatacttccaattaatcccacttaatttaccctcatagtttaccaaaatcaacccactagtatcatcaagttgatcattaaagcatcctgcgtcaaaatacttaaattcctcagaccttacatcaaagcaaatgatcacacaagacggtacaccaagagtctgagctaagtaatacaaaactccattgatacatattccttcactcaaagaacgatcatatgcaggacaactaatgatattactcctccagctcagttcctcagttcctaatgtcagaatctcatgatgttccctttgatcagaaaatggataagcctcagacaataccttgaattgcttaccaatgggatcaaaccctagaaagcctcgagcatttttgtacctcatcagatcaggtaagctctcatacattcctgtggtagggttacaaatcacaggcgatgcatcttttgagagccacaaatcagggaaacagagcaaacctgagacatagctacaaatgaatcggcttacgtctcctgagaattttgtatgataatccaaatgagaagacttctcatatcgattctgtggctgcggcgacgagaagaagagccactcaccatttcgttcggcagcaaacagcagacgtggacgattcgaggatctggtcaggaagagctcggtgaaaactggactgcgaagaatagacgcccagtgcttcgacaaggtacgaaatccaatgactgacttcgccggcaatctcgagaagatctcgagaatgagatcatttgggattggttccatgaagaagcgtttattgccgccggagtgtgtgattgtttcgtcggagaaggagaaggtttaatacgacgcaacaagattgggattgtatgggcctttgggctttagcatagttgtgaatgagctaagcccatttattcattgcgataattgggacttttggtttgttctctcacgtgccaatcggtatgttagatatgtggtagcgaatgaaggattagttttcacagggattctaaatatcatgtaaaatgtaaagaccaaatatgttttggtaactggttatggaatctctagctactattagcaacaaaaaaaaaagacagtagaggtagagcttgctttttgatttaggatgaagaacaattgtttaatggctaaagcaaaagcttagtatctggtgacaaatgtgtcaatacagagataaatttattaggcttagcactcctttttttggattaaacaatcaataaaaacgaaatagaaatataatcagtttgtgtttttgctttagtgaaacagaagaaaatgggttcagttattactttttctttattttttgggatttgtgtagaattatgtacaagtcatatactattaaaataaatgggattagggaacaatgtggtgagttaaatgtgatggtaagagaggaaggaagaagcatgggataatggtgaagggagcggcgcttaaatctgaaaatctcgagaatgaagaaaacacgtcacttcactctcacgatcgaacatgtgattcttgtgtgctgcgacgactcgtgactcttgcctctctttttctcatgcatggctctccgattctccgacgaaagaaggaaacaacaaaaagataaagatgagatatcgtaaaagctttaaagctttaaagtgtcctcaagaaaaataattctaggaacccaaaaaaccttgtctcgctagatatcttggtaacatgtacaagtaaaatattagagctagtcataacaaagaaaaacaaaaaaaaaaacatttgagttcctgatgattaacagaaatttttgaacataataatccaaaaaaaaaaaaaatgtgtgtgtgcaattgttctaacttcttaagctatcatcaaaaaggtgtaataactaataaggttggcattgcgactgtttggaatgcaggggacaccaagaactagggattatattattctagtttgagcctaggtagaagaattatataaatatgaagttgagatcaaaaatggttaaaagtttttttttttttttttcttttgaaaataacagaatatgagaaaagcaacggtcacatgcgcgggtgaaaaaagcaattctctaggaattgaagcgaaccgtgacattatttaagcactcacatactctttctaagctccattatcatatcctcttcttccttcttcactatcaatcttcttctccactacaacacaaatggagaaatcatcctcaatgaaacaatggaagaagggtcctgctcggggtaaaggcggtccacaaaacgctctttgtcagtaccgtggagtcaggcaaaggacttggggcaaatgggtggctgagatcagagagcccaagaagagggcaagactttggcttggctctttcgctacagctgaagaagcagctatggcttatgatgaggctgccttgaaactctatgggcacgacgcatacctcaacttacctcatcttcagcggaatacaagaccttctctgagtaactctcagaggttcaaatgggtaccttcaaggaagtttatatctatgtttccttcatgtggtatgctaaacgtgaatgctcagcctagtgttcacataatccagcaaagactagaagaactcaagaaaactggacttttatctcaatcctattcttctagttcttcctccaccgaatcaaaaactaatactagctttcttgatgagaagaccagcaagggagaaacagacaatatgttcgaaggtggtgatcagaagaaaccagagatcgacctgaccgagtttcttcagcaactaggaatcttgaaggatgaaaatgaagcagaaccaagtgaggtagcagagtgtcattcccctccaccatggaacgagcaagaagaaactggaagtcctttcagaactgagaatttcagctgggataccctgatcgagatgccaagaagtgaaaccacaactatgcaatttgactccagcaacttcggaagctatgattttgaggatgatgtatccttcccttccatctgggactactacggaagctt

SEQ ID NO: 110 - DNA, 109016 bp, Arabidopsis thaliana
atcaggtttggcattgagacccactccgaggattacaatcgtgaggaagcttgtgatgtaacatggaagctcccaatcttcccacttgcgcgactgtcctggaggcggcggagtccggttcatgaaatatcctttgggtcgttcttcgtgacccggtgtcgcccaccggcttggaccagtagatgtggatccagatcggaagtggatccggtttcggagcgtcttcgctgcgacaatcaatggcttcgtcgacgccatttttgtgattccgatttcactctcagtgatatattgatgattagacgtaaataaactctagtgtgagaaaacctacaattacttgttgaaaacggtgtcgttggagaactcgtgctcacacaattcacaacgtagtcattttggagaaaacaaaaaccaaatttccaattctctcacaaagaaatataagaatccaaaatctctttactaagcaaaagcaatgttgttttcaccaaccataacgtaatcagactcaaacaatttcgtgtaaagaccagaagtgaaaccaacaaacgagacattattcacagtggaaggtctaaattcgagaggaacattccaagcagcattcacatcatcatcatctgaccatttcaggtcaacattctcaacgcgaaacccgttcacatgctccataatgattccagacgtggctctatggttcactagaccttgacatccaggtctatagtccacaagccctgcactgtaattactccatcttctgaaagtaaggttcatgttcttgaactttatatctgagagtagtccgtttggtgaacctgataaaaagactccgttttcggaatcgattgttatgtttacgaataggagattcgagattgagccttcctttgcagatgagtcacgagggcaagttgttatatagattggttctgctcttccccaccaagaaggatcgtagtatcttgtactaatgtttatgtttgaaaatgtaacgtcactcacatttcctgcacatattcgggttacattacataagtttctgtgttgtatgcagccaaagaaaagaagaaacttgtttacctccatcgcgtatttgcatgccaagtcctctgtgagattcaaaaatagtgatgttatcaaagacaagacctttgaaatcaaaccagctcgcactaccgagtttaatggctgaggatttggtccggatccaacagtctgtagcggttaagttgtaaagtggaccagtgtaagtcttgggacagattgcatcatctccagtatcgatatgacaccgagttataacagtgttgttggaatcttcaatgtcgattccatcgttatttggagtattgaagtccccaaggatcgatacatcatggactgatgtgttctcacatctcacaatgtgcaaactgcaatgagagtgtgtatataatcaaatcagagattacttagcacagaagcctaaattctcagctagagttactttatcttcgatctaagatagtgaaacaaagtcaaatttgttcatagagttctttgtgaaaagcagaagtttcaaaactaaccaccaatacgcaggctctcgtagtgtgatgttccagatctcaacgtttatagaatcaacgaatccaacaagcctgggtctacactcatcacccaagcaagctccggtttggttccagctcaccatcacgttcttcttctcgtcgaatctgaccacgaacttcgatccttggccatcaatcgctcctccgccagtgattccaacatccgtagcgttattcgccaccaccacgtaccaatccgacgaagtctccgccggataataatcctcgattctcggtccaccgagaagcacggcgttctccgtcacatcgagaatgacgccagatcggagatggagcttagcggtcaaatagttgccggaagggaaaacgacgcggcagatggaagaaaaagatgtgtagtgacgattgcaggcgtcaatggttgactgaatcgcagaagtatcgtagttgataccatcgccggtagcaccgaaatcggtaacggagagggtcagagaatcgccgggaagttgaatttttgaatatgacgtgtctgaacgtgattggaccagagaaaagaataatagtaacaataatatgcttcccatcatttttttttaaaggtcttaataataatcttatcctatgtctatgtgtgtagactttattggaattgataaacaactgaaactagaattccagatctcttctatgaggatcgtagtgtctttaccgaatcctggatagtttgatgcagaataataagctatgagagagtttgtaaaaacaaaaacaattaattaggcacaataatagtgaaataatactacaaaaacatcaaaaatttaagtaaacatatatgagcaaattgattaagcaaattgattaagcaaaagaattaaaaagtgaaactttctctcgtgtagatttcgtctaaggcggttaatttgttgaatcttaggctgaggaagagatcgataccatctagtggcgggattgatgatacacatcaatctttctatacggtagacgcaaacaaggccatcacagcttccggtaacgtgctttgcactcatatttatgattgcatctctgttcttatcgaatgagtcaatttagggttttttgttacctaacctaaaccataattcaagaggtgcattttcacttggtccagctcaaacaatctaaacatatagttgcattttgtttttgcttcttctttttcgtgcaactccaatatccaaaggatgcccctgcttcttctttctgtttttgtttatcgatactgatttatttccctaaatagaatttttttatctctatttattattagtaagatatatataacgagatcaaaatgatcatatcctactaaattctacattgtcgaaatctggtacaagaataagaaacaatcataccagtgttgtctctctgaatcaaatgactgataccttcttaacagatatctatatttatgattatatttatatagagagaaacgagcttatacgatgtatatacacattcatgatctctaccgttttcccaacttacagctccattttgacctgatttgggtgcaaattagcagaagccaccattacattttcagaaactgccatcaaattgctgttatcattgccatgagcttgatcctcttctcttccccataccggctggttcaagccgtcaaaaggccattgttgtgttggtggttgttgcagttgccggtgatgaaaggactgttcggtctcaatggcttgctgaggccaagcaagctgcattggtgcggcattgaagctcccatccattaaagaaccgttctgtcaaagaaaaaaacacagagccaaaaccggaaaagatatcagcaaagggatcattcatagagatcttgatctagtcaaagaagtcaactgttgttgctgtgttattattatcctaaaagaacaaggtttgatgagagggtccctggctatttaatggtggtacaagctgtaagaagaaagagagagggagcatttatttagtttggtccaaaacttttgatgagaatccacaggtgatcatgaaattagataggtcactttgaaataacaagattttggaagagacccacagaaattattgagggatgaattaactttttttttaaaaggttcatcaagtaacacatccgacataagtcacagaagacacagaaaggttttacagaacaaaggtggtccgagttttgacccactactgttatttgcattgggtgtgtgtgtgtgttgtgtatttatttttccctgagtttccttcatgagagtagacgttgtgatcttcctatgccttacactaaaatggtctaaattaatgtttgtatcaataaataccccaaaagtttctccttttgtgatagaaactagaagctactcaaagaggtatggttaacttaaatgagaaacacatgaaatggttaaatttttcctagagaagactaatcagaatgaccaaattattgtttgagattttgatacttacttctgaagccaatatggtgtcgagattgaagtcgattctggggtttaccgcagcaagtctcattgatagcatctgtggaaacacaagtcacagtttcatgagattgcggcacataattctattcattttcaaattgttttgagttgacccttttattgtgcccagggctattgtaaaatataggtataaagaacaaaaattggaccacggaaagtctcacctccacttgacgttgtaatgactggacatggttaatgatttcatccagcaccagcgcggtaccttgaatctgcaggtcaaagactttctgataagctcggattcatattaggtagatctgctttcacataccaaaaattctttctagacagctaactattgttaagatgatccaatatttcaacgagaaaataccaagattccaaaatacacagtgaaaaaagcagcaagagaatgacgtgctaatctaaagctattataataaatggtatctactacaatcacaagtaatcagtataccctaggggggctaaaggaacaatcaatcaagtcctcacagctcacctatagaatccaaattttaaacaaacactgatgttccatatcatcatctctatcacaccaataattgctgctaacttctaacatcagggatgattaattagctgtctgggggagtgtcacatcatgtttccaactaattaggtatgtgggactcaaagcatatcaatttttgtaaaggatcatttgctttaatcgtccttctaagagtcattttctatttttccttgatagataccgaacttgttagagacgatactaccccttcctcaccttccatagaaagattgcaacttttttcccacttatcatcaaaagatggaccccaaaacacactttgatcttgatctttccaccaaaatctgtcccctaaacccaaaaccttaatggcatattacagctagcacacttcctaaggtcattctcgtcatttatagactaatcttcaagctcaacgaacacacttatggaaaaagaattcgataaagcaaggtcctatcacttccgtgtgactgagttaaccttaaagctaagtgtgtacccgtgagatatttctccccacacgaaataaaaaaataaagttgagatctctaaaggcattactacacaattacccaactggctactttggcacaccaggaaccacttttcttaataaaaaagcaattaagcaatccactttttaggaagaaaaaaaaaagtaggtgtgaaggattaagacccttaacaaaaagactagatcatctaataataaattcttacttttggagtgaatcaattagagaaatataatgtcgttaatcacaaatgaagacctaatgattgattaacaaattgattacacgtctatatctaagagacaaaccttatcacagcctgggaccagttcctgtaacagcttcattcgtgcatttatcttctctcttcttgcctataatccaaaaattagtgatcaattagcgaattaatcaactgattaataccaaaaaaaagaaaaattagtgaaggcagatgcaagttactcgttctgctaagctatggctatcggttgcttgaccacgacgagctctaacgtgaacatatggcagcttctcgttctcttcagagcttttgttcttcttcgtcgagcttttaccctataaaaaatcaatctgatgaaacgaaggatcaaatgtaaaaaagtaaaaacatttgtctctcactctaaccttcttttcgaaatctttcctcttcccatttcgattgttctggttagggcaagggatttgattctcaatcgctgaatcagaaatcaaccgctgagatgaatcggtctcagcaggctccgtcttgactctgtcgagattagcacttgaattggaaggtacagagctcgtcggagtctccccggagatatttccgttttgttgctcagtggcaatcaccgagaaacgagctgctcgctccatgagaactgagttagaaggaaaagccaatgtcccaccgaaagagtgaagcggcggaggaatctctccaccgatccctgtcactgccgcttgttgagaagacgaagaatcagtgaaatggagaagctccactgcttgtgtaggtggaagctcaagcaaagccgtgaacgaaccgccggggttctcgggaggtaaagtcgtcactagttgccgaaattcgtcaccgagatgtagcgattcaaggcctattggttcccggcacggtccaacaccgccggatctagctccaaatcctccagtcagatccataaacggaaactcactggaaatcttcgaaaacaataacaccaataatcgaaaccaaattcagcaatttgtgtaatcaaatctcacgacaacaaaaccctaattgagcctccaaagagagcgagagagagacttgagtagaagacttttgtcagtaagcgagtaaaatgcggcgaaaaatagaaaggagagaaggtgggcaacaatggcggtctgaagaaatccctccttcttctatagctcagagaacttggcgaagaaggaatagttattctctcttcttcttcgtcttctttctcaaatgtgtgtggaagaaaagcttttacaccagaagaagagtaggacgaaagcaacgttagcagtggagtgcgtctgttaaataaaggccactgttagacaaaagaaagagaaaaccaattttggttattgtaggtacggtacggttcttttgttatatattttgctggatcccaatggatattacttgggccttttgggctttaaccggtgactttttatctctgattataaactttttttatcactccttaattttgtaattagtaaatttttgaagtattttgatactataatataaaaatgatttgaatagggcgtaccagaaaacggcacatatttatttaatcgaatcggtagattagatttattcttcagcaggaccagcctgctgtctctgaccacttttctttttttctcggtataataattggattttcgtatagtattattatcagtagttaatgccataaatggtgttacatcaggttttctgactttccacggactccgattccggtgtcaaattattttgttgacctgtaaataaccaagaaccaaaaacactttttaatatggaaaaataattgagctcaaaacaccattttagtaattatctcagccgttggatgaaatctaccaagcgtaatattaattttttaaaaatattttattttttttattttttaaaaatattcaaaattcatcaagtattaaaaactttagagtataaaaggcaaaaataaaataaaaattgagacgtactaataatattaattcaaaatatcttataaatttattaaaaggaaaaaaaaaaacaattaatgttacttctttaaaagggtgttttggggatagagaggaaaatttgaggacaaagatgaacagatgggtccagtggaataacctgtttcacacaatgggccgaacaggaaatccacttatgctctaataatctgagcccaaatcccaatttccatttcattgcaacaaatcatcgttgcttgattattttgattagccaatttcttcttcatgtaagtaaatctcaaaactgaaatttagtaaaaaggtgtagaagtggaatataaatgtgctaaaatatcggtttcactttcagcgattggtgatgtaaggtttggtgtagtagtaaagtctcaatcaaagagaggaaaggtacaatctttttttggcatttccaatttggcaacgttacttactctcccaacgtccattacttctttggtgtctcagatattgatgtggccaattctttaaccaacctaattcctacgtacatatgtgttactctttcacatatatacactttattctaaatataaagattttgaagctatacggctcttttctgtttttattcaattagatgtcaaaatgagtatgaaacatgcaaagtctttatcaataagaaacattctaattatgcaaagtctttgccattataaacgcagttcaattttagatgatttatctttataaaatttgttcccgagcacagtctcgaactcatatgagactaaagtttttaatattcacacataaaacctttataaaaaattaaagagatatattttcttttattgctgagaaagctgtgaggattatcttcacaatacttacggcatctccaacacatctctatttttgtctctacactctatttttgcttttattacactccaactcatctctattctcacttccattatagagatctctatttttttctctatatatagaaacaaaaatatggatctctatttttttcccctatttttctttctaacaaatagagatttctatttttgaagaattattggagtaaaaatagaaatctctattttctcttctatatttacaaaaaaaaaatagagacaaccattgcagatggtcttattaacgtatcacattgggatcatgatggatttaaaaggatagatatgggcgagaccacaaagatttttcggatgtatacgtgaagcatgaaaaaaaaaaatgtgcgatgaataaagaaatatgtttagaaaatattatagataattcgtttatatatgagtgggtctggatccgcgtgttaatcacgtgacactggcccaagaagcctctcttcgtagtggagtggtgtgggaattcccttcttcccatattaaaatgtttcgatgaataaatgaatagctctctctaaccttcttctttttgtgttttaatgaaaatgttttatttttctatgtagcttgcattattcgacagctgttacaaacctgacatgcatgggatccacacaacaacacacatatctctttatatgagttattcccatttcccaaattgctgagcaaacgacatccgtaagcagagttaagactattgaaaagtgcataacaattatggttgtcaaaacgttgtttgtaagttggtttagctaataatcattataaaggtagattgtcaatggaaatatagttgtaaaagcatttaatatcaaacccccaaaaggaagaagcaatgtatcacaaacgattcaatatcttaggtgaattttgctaacttcgactaattttatgtagagtacgaatgtccacaagcaattgtctatgtaatgcaattgttccacgttatatgaagcattgctcgtttctatcgtcaactataacatttttattttcatcaaaagattgtttggattatttagtcgtataatattttgaaacatatcaaacatcatgaatgcacttcacctcccaaaataagaagtctaagtccagtgctaaatttggttagcgtcgtaatgattataaatcgtcaataacattgaactgtccaagtgtatatatatatatatacttaaatgattacgaaggagacgtctctaaattttctacgttatacgtttacacgtatagaattcgtcgtacatttaaatacacgtacatgtatatacatatttggcacaatgatcgatactgatacagtgttgtgtaatagtaaatagtaaatacgttataggtaatgagtgatgcaagtcgaaacacttctatcgatcattgttcacatgttagtttcgttggattcaaccgattttcttataattcattatatatacattcaacttaaagaatgaaattctactttcaaatgcattaattgtaagatagcattaatttgctcatttgcaaagatactttgttatatgtgtctgattaaaaaaaaaacgaattgatgtcagaaatgagtgccacaaaatctgaacacaaagaaatacaacaaatcgtcattgtttgtaccttaatggtttgtttaagatccattgtaaaacaatacctcatcgtaacaatgtgatcatataacattataagttgatgcgtagacatggattagaaataagagtctcgcatacacacacaatgaaagaaaaattaaaattgataaggtagaagaaaatatagtgatgatgataaagaccggaacatacgaagggcccaggagacaaggacgaaacaaagtgggcccataaaagaagtacccaaaaaaaaggacttgtgataaagttgggcccatcgtcgatgatcccctgtgaatacccgaaggccaaaaatgatgggggggacccactgaccaagttgcacggcgagtgatgtgttctgtttgggtctaaatgggccgcgaaaacgatgggcccaacttattcattgctttgccagagtcctttgtgttgtttgtagattgtagtactaacggcaagctgttcgagactattgccagtttccggaaaagttttctgacacagactaactttttgttgggtttcccattccaagtatcaagatattattagtttaatctggacgaacgtataaataattcatttcgaaaattatcgtatgtagtaaccaaccagttcagtattcttaagtgaaaaaagtacaaaatttcaatacgatcaaatatgtactagtttaaaaaaaaaaaacatttctcatgcaaaataactggcaaacataaaaacgggttgggtaacctgaaacaaaactccagcccaaaatgatgcccgcttatacggcccaataaagctaaagtttgctgcgaacttaaaacggcagcgtttgctaattagattgagtaaagcgatttcacggtgcaacagtcgaagcttctcgacttgttattgtttcgtagcttcgtcggtccaacaagaccttgcgctagaagaacagtttcggctttgttttgttcaattctcacctcaccccggacagagtccaaaacaacggtttatttcttgcgtttgtcgggaaatcagagttgagtataataaacacccttcacgacattctttgcttgtccaccttggtaatcctccattcactctcttcacgtgtttctctcttgataattctctgatacccgtacgcaattttatctttccttcttcgtttcttcgatttcaatacgtttggattgtgtgttggtttcatttttctgatattagaaatttagttgaaacattacctgcaaatttgcagttcttaactagatagcttgctcttttagcgatccttaaggtatattttgttatctagttatgattttgtttactataccattgcctcattggatctatcaatgtaaaagacttggaaattgcgttgttgttctttgtgtaggtatctgaaattgggggactcttattataaaagatatgatgatttgttactctccaattacaacatgttctaggaatgctatcagtatcaagaggcatttaggctctcgcctctacggcgttgtggctcacggatcatctaaattctcctgctacagtcttttatcaggactttcaagaagacattataccggttttcgtgtatcggtctctaatagaccttctagttggcacgataaaggactttttgggtcagtattgatcaatcgaccaactgttgctcctaaggaaaagcttgaagtttctttcttgtcccctgaggctaatatgaaatgctcgaagatagaatctaacatgagaaatctctattgttattcaagatttgcatatacaggtgtgattgttagcttgcttgtttgttattcttcgacttcccaatcagcgtacgcagattcttcaagggataaagatgctaacaacgtgcatcatcattcgtctgatggtaaattccacaatgggaaaagagtttatactgattactctatcattggtaagtgtccaataatattgttgctcatcttagtcttatgtcgaccgttgtttgatcagaaaatgacaatggttttttaggtattccgggggatggcagatgtttgtttcgttctgtagctcacggattctgcttacgctctgggaaactagctccaggcgagaagatgcagagagaactcgctgacgaattacgtaccagggtaagtatctatggttaagagtttttatctgtcatactttgccaccaaagatcaaagtaactgttgaattggattcatatggcatcgttagtactttttctctctgcttcagcaaagcctaggtcttaatttcatctatcaaagttcctatctatgtgttatctttgaatgtgataggttgctgatgagtttatccaaagaagacaggaaacagaatggtgagtttttcatgctttcagaccaattttcaacttcattcactggctatggactactcttaaacttatacatcacatttgttgatctcttattaattacgaactactagcagctttttctttgcatctactcattctgatgattctcatcaggttcgtggaaggagatttcgacacctacgtcagacaaattcgggatccacacgtgtggggaggtgaacctgaactcttcatggcttcacacgttctccagtaaataacctcatcctctctgttctttttggttccttaacgttcatgatttcagtttctcatacacaatctagattgaaatctaacaaactccgaaattgtgatcataggatgccaatcacagtgtatatgaaagacgataaagctggaggactgataagtattgcagaatatggtcaagaatacggtaaagacgacccaatccgagtcctataccatggttttggtcattacgatgcccttttgcttcacgagagtaaagcttcgattccaaaatctaaactttagtatacttagttttgcatctttgacttttgtcaggtgttgatgatgtttttgtttactgacacaaccactatctgtatgccttgtagaatgtaacctttttttaccttttactttgaataaaaattttcagtttcaaatgatatgctcgcttcaaaatcttagcttctggatagatacaaagcttattgtagatactcgaaaagagtatatgtggtcagtgtgatatcaggccattgtggttgaaaagttgaataatgatttaaaatggtcccaaacgtgacaaaagttagttctacttcatagaattgagtggattacacactagagacattgtagctaagaaaagtgtaaaaatgtcggactagagaactattggtcacccttgaagtcgttgacgacatcgtatgggatgggagtgatagtctccaaggtcataccttcgaccatgaatcctagtttgggtcctttaggctacctctttgtgctaatggtttctcctctggctttggatgcagccttgagctcatcatttttcttcttcctcagcttgaactccacagcacatcttgactgctgcacatgctccacaagaacatggatcctcttccttatgatcttatcgccaatctgataaacccacctcaagcaaaaactcaaaaatcagtgtagagcagatattgtcatagcttctatagagacaaagaaagaagagtaactaaatctaaactgtgaaagtacaaggttagtgtatttgttctttgatgattataggttgctaatcacagtatatatgaagcacaagaaagttagtatatatcgcaagttagggtgaaaagtaaaggagatcagattaaagtcctatatcccatggttttggtcactacactgcctttttgattcatgttaagcaaaacttcaatccaaaagtaaaggatggatatgcttgttttgaaccggtatgaatgccatccggtacggttgttgttggggacataagtgggatattcacatgcatctttgtaattggtgactttttgtcaggtggtgatatattttttttttttttatgtttctgacacagccaccacaatctatagtatgtcttataaaatgttacctttcaagtaccatataccctttaatttgaataaaatttcaaataatttggtcgtttcaaaatcatagcttgtgtgccacacattgtcaaaatcgtgataatacaaactacaaagttcataatatttgtgggcactcaaaagatatggtcagtgtgatataagtagtgttgttggtcaggccactgtgcttgaaatgaaatgatttttttttttaactgaaaaatgaaaaaaactaaaaacaatacttcaaagatgttctgtttgctgatcaagccaagtaatgttcaccagctaagtttagtaattagtgttgtttaggttcatgtctcctactacaaatgcaaattcaaaatcttgtcgtcagactcggtttccaagtaataaaaagcctaactcgtgctcattttccaacaaaaaccaaaaccaataatcatctacatcaccatcttaacaccaacaaaatttagaattttttaaacaaacaattaaaaagcacagagcaacacacctgcatcagtcaataactaaaaactttggatttatcaatcaaaataactaaactgtcacagagcaacaacacattattttattagtatttcaaatttatatccattaccaaatacatcttccaacactttttaagctcccacaagaattcaaaaaactttcctatgtctacattacaaccacgttgctactttggaaccccatcaccctaattcctctctttcgtcttcttcttccctcgtctctctctctccgcaactcctcgttgcatcactttacattgaaacataatctgtagatattaaacaaagtcttttgcaagattctgattctctagacaaatatgcagtttcttcgacttcttacacttcttgtttcttcctacttcttcttcttcatcaacttctcctcctcactgaatccagatgggttgtctctacttgctctcaaatccgcaatcttacgagacccgacacgtgtaatgacttcctggtctgagtccgacccgactccatgtcactggcctggaatcatctgcacacatggccgagtcacctcactcgttctctccggaagaagactctcaggttacataccctctaaactcggtctactcgactcactcataaaactcgaccttgctcgtaacaatttctcaaaaccagtgccgactcgtctcttcaacgccgttaatctccgttacattgatctctctcacaactcaatctccggcccaattccggcccaaatccaatccctcaagaatctcactcacattgatttctcctccaatctactcaacggttcactccctcagtcactcactcaactcggaagcttagtcggcacactcaatctctcttacaacagtttctccggcgaaattccgccgtcgtatggccgttttccagtctttgtcagcttagatctcggccacaataatctcaccggaaaaatacctcagattggctctctcttaaaccaaggaccaacagcgttcgccggaaactctgagctctgtggtttcccattacagaagctgtgtaaagatgaaggtacgaaccctaagctcgtcgctccaaaaccagaaggctcgcaaatcctcccgaagaaaccaaaccctagcttcatcgacaaggacggaagaaagaataaaccgatcaccggatccgtaacggtttctctcatctccggagtctcaatcgtaatcggagcagtttctatctccgtatggctgattcgaagaaaattaagctccactgtgagtacaccggaaaaaaacaacacggcggcgccattggatgatgcggcggatgaggaggagaaggaaggtaaattcgtggtgatggacgaaggattcgagctcgagctcgaggatttgctgagagcatcggcttacgtcgtcggaaagagcagaagtgggattgtgtacagagtagtggccggaatgggatcaggtacagtggcggctacgtttacgtcatccaccgtcgttgctgtgagaaggctaagcgacggagatgccacgtggcggcggaaggatttcgaaaatgaagtggaggctataagtagagtccaacatccaaatatcgtacggctaagagcttattactatgctgaggacgagaggctcttgatcactgattacatacgcaacggcagcttgtactctgccttacatggtaatttactaatcttcattaatcaaccactaattatgagactaatctcaattttgttttatgaatcttggtgttgacaaaaaagagaggtttgttttggagtttgtgctcttgaaccagttgattggtgaatctgtatagatagagttttttttttgtctatattagattgtatgataatagaaaatttgttggcgtcttcttcttggtcttttctgtttcaaaatcacatgtttggtaactgttatggttccagagaaacttggatttttcttctcgtcgaaaacaacaacgtaaattctgtttttgcgacagttttggattaggatagagcaatgtagaaggtggtgcaaagattctatttgtcttagcttgatgagagaatattgttggttacgtttaagaggttaagattggtattaaggtcgtgtttaatgagacagaaacaagcagaggtcagattaagatatgagcatagagttgagatttttttccagaatttgtttgttgtttgtgatcattgatttgagaagagggttttgatttttttgtaggtggaccctcgaatactctgccttcactctcttggcctgaaagattacttattgcacaaggaacagctcgtggcttgatgtatatacatgagtacagcccaagaaagtacgttcatggcaacctgaaatcaaccaaaatcctgcttgatgatgaattactgcctcgcatctcaggcttcggtcttacacgtttggtatcaggttactccaaactcatcggttcgctatccgccacaaggcaaagcttagaccaaacctacttaacctctgctacaacggtgacaagaatcacagctcccactgttgcttaccttgcacctgaggctcgggcttcttctggttgcaaattatctcagaagtgcgatgtctattcgtttggggttgtcctaatggagttgttgactggccgtttgcccaatgcttcctctaaaaacaatggcgaagaactcgtgcgtgttgtgaggaactgggtcaaggaagagaagccgttgagtgagattttagacccggagattctgaacaaaggtcacgcagataagcaagttattgcagccattcatgtcgccttgaactgcacggaaatggatccagaggttcgtccgaggatgagatcagtgtctgagagtctcggccggatcaaatcggactgagcacgttcgagggaactcagaaagtaagttagaaatgttgcaattccgttgagtgtaaaattcatgcaccatcatgttttgcttctcaatgagtagtatatttttggcatgttgtagggtttagggatcatgatcatcatgtagccactctcctttgttatacatttgtaacggatgaaggaaagtacttgattgtttcttgggtttaacatataagccttgaccctctttctagaatatcaaatcaagtcgctttaaccctttaacaatgatattagatcttttaatgtagcattaacaatgatgtgtgtttcaagagaatacaaaacggttattagatcataaaacaggtgaataatactaatggttttagaaaccaccaagctagccaatgttagagttaacgcacagtcggttactacttagcatggtctaaaaacatacattcacaatataaatactcgtaacgaaacattgcaaaccataaaataaagaataaaagatggcttcccaaagaaaactgataatggttgtgatactatcgtcgttgctcatgaaagtagcattatctcaatacggtgtagtgatgggtaagagtatattcaaatgggaattttttccaatgatatctgtatacatcacaaacgatatcggaggtggtttggtgctacattctggttgttatactagcagaaatgggtatcgtcgtattagagacttttttccagggagtatgaaaatattcgctgaattcaggaaaacttactggggacgaactcgctatcattgtgaatttagatttggagatgaaacacaaatacatcgtttttctctttataaagatatcagagataatattgacaaatatcagtgcagacactgtttttggtccatcagaaggaatggaccttgtgctcttaattcacatactggaaaatatgatatttgttatgcttgggataaataaaccaattatatatatatatatatatatatatatatatatatattgttgtttatatgatgataataagtatatgataacaaagttaatatttgaactcatgttcattattaggcaatggtttagtgaatatgtgttgtggtgtgggctaagaaattttaccaataccacccacttacagatttagaacatgatataatacggagtatgacttttgttaattaatattggagaaatcaataatacatttcttaagtcttgaattccgaccaattaacgttattagcttttatgaaagtcttattgtaaaaaagaatctcattgacccatttgaaaattactatctcggggttgtcctaatggagttgttgactggccgtttgcccaatgcttcctataaaaacaatggcgattggagaagaacttgtgcatgttgtgaggaaactgggtggctgagattttagacgcagataagcaagttattgcagccattcatgttgccttgaactgcacggaaatggatccagaggttcgtccgaggatgagattagtgtctgagagtcttggcagtatcaaatcggactgagctagtttcgaagtaacttagaaagttagttagaaattttccaattctgttgtgtaaaattcatgcaccattatgttttgattctctatgagtagtatctgtttggcatgttgtacggtttagggatcctgatcatcatgcctctgtcctttattgtacatttgtaatagataaaggaagatactttcttgttacttgggtttaacatttaagccttgacactctttctagaatatcaaatcaagtcgctttaacataacctacaattagatcttttaatgtagcattaacaatgatgtgtgtttcaagagaatacaaaacggtcattagatgaatactaatgttttttttttgtttcctttaatttagaaacagccaaggtagccagtgttataagttaaggcacagtcgtcagttacaagctaacaccgtctaagaaaaatacattcacaatataaatactcatttaacgaaacattgcaaaccataaaacaaaagaaaaaaagatggcttccgaaagaaaactgataatggttgtgatactatcgtcgttgctcatgaaagtagcattatctcaaaacggtgtagtgatgggtaagaatatattcaaatgggaattgtttccgaaaatatttgtatacatctcaaacgaaagtgatgtggacttgcattctagttgttattttaacggaaattcgattgatcgttaccgaggattagttttaccgtggcgtaggagattactcgttcaattctggaaaaggttttggggaggaactcgctatgtttgtcaatttagatttgggaatgaaagacaaatacgtcattttactatttataaagataacagagataatattcacaaatatgagtgcagacactgtttttggaccatcagaaggaatggaccttgtgccttaaattcacatactggaagatatgacatttgttatgcttgggataaataaaccagtaatatattgttctttatatgatgataataattaaagggtgatgaactaatactggttaattttccagttgaatgatacaacgtatttaatataatcggactgtataatttttgagtcacggccgtatcaaatcggctagttttgaggtaactcagcaagtaagttagaaattttgcaattccgttgactgtaaaattcatgcaccatcatgttttgattctatatgagtgagtagtatctttttggcatgttgttgggtttagggatcctgatcatcatgtcactctcctttgttgtacatttgttatagatgaaggaaagtactttattgtttcttgggtttaacatataagccttgaccctctttctagaataacaaatcaagtcgctttaagcctttaacctacaattagattttttaatggtagcattaacaataatgtgtgtttcaatagaatgcaaaacggttattagatcataaacccccaagctagcaagtcaatgttttaagttaacgcacggtacgttacaacttaacatggtctaaacaaattcattaacaagcctataaatatatgaatagaaaacgaacctcaacgaaacattgcaaaccataacataaagaagagaaaagatggcttcccatagaaaactgataatgcttgtgatactatccttgcttatgaaagtagcattatctcaaaacggtgtagtgatgggtgagaatatattcaaatcggatttttcttttgaaaatatatgtatacatcacaaacgatatcggagatggtttggtgctaaattctagttgtcgtagtaatgggaattattaagaccaagtatttttaccggggcgtacgacggaattcgttcagtttaggaaaagtttacggggactaactcgtaacgtttgtatgtttatatttggtcataaagcacaacgtattactatttataaagatagcagagataatattgacaaatatcagtgctgaaactgattttggtccatcatagtgtatggagcttgtgctcttgatgcacagactcgagaatatgatctttgttatgcttgggactaataaacatattatatatggtgataaactgataatagttatatacaaaaaaaattactatctgaactcatgttcttattatgcaatatgtaacggtaagatctgtgccgttgaacggttggatcggtaaggcgtagagaaactcaggtaggctttgatcacagacaaactttactcggttatttgcattaggttttacaagggtaaaaatgtaatctcagagacaaggagacgatttttttaagcgttgatcccgcctgtgatgcaaaatttgaaatttgtttcgcacacgtgtgagagagccttctaccgcacgtgccagtgccttcggatttgtttcctcattataatcccgctcaggaggcgaccttgaaatattgcccagatcgtcactctccccaagaaagctctcttctctctctcactctctctctctcattgtctctctacacagttttggagtttatcaatagctttattgaagattcaaaggtaaacacaaatccatggtgtttcttcttctatttgattgcgtttatagacgttagggtggggtttaccggtgttcttgtgactcgatttgaaattggaatcgggtgatttgtgatttcattttgggattgtttgtgataacctttggttgtgttctccgtttcttgatatattattctggaaattttggggttgatttttaaggagaaatgaacgatttgatttctgggtaaaaccctagggtttcttcattcagttttgatgtttcagtctctaattgaatctatgttgttgtttgtttcagcgacgttatcaaaatgccagaagcaagagatcgaaccgagaggcctgtggattactcgactatatttgccaaccgacggagacatggtattttacttgacgagccagattcacggcttagtttgattgaatctccggtgaatccagatattgggtctattggtggaacgggcgggcttgtgagaggcaatttcactacatggaggcctggtaatggcagaggtggtcacactccatttagattgccacagggaagagagaatatgcccatagtgaccgctaggcgtggaagaggtggtggtttgttgccttcttggtatccaagaacacctctacgcgacataactcatattgtgcgggtaaattgacaagctcttttgtgttttcctgttgattcttctttgtataatcagttttggtctggcatgggttttgctttgcagcttggttaaatgtttgggatctctcttgtttgtggtgtagcacatggaaaatggtttctctgagtctaagtttccccattggtttttgtaatccttcttttgagctgaattaggaatctgctactgataggtttggtttgttaaagcgtttctgtttattattgatcatagcaggcttgcttagcctatctgtataagttttatcacatagatttgttgccttaaggcttgcttagcctggcgatttattctgttgacactcttgaactacaggctattgagagaagaagaggagctgggactggaggagacgatggccgagttattgagatcccaactcatcgacaagttggtgttcttgaatctccagtaccactgtcaggagaacacaaatgctcgatggtcactcctggaccatctgtgggattcaagcgtagttgcccaccatcaactgctaaagttcaaaagatgttacttgacatcactaaagagatagctgaggaagaagctggcttcatcacacccgagaagaagctactcaattctattgacaaagttgagaaaattgtgatggcggagatccagaagttgaagagcactcctcaagctaaaagggaagagcgggagaagagggtgcggactttaatgactatgcgatgatctttacttaggagaagagaccagatgcgatgatccttacttaggagaagagaccatagaggtatatctgcttaaaggttcctgcacagtgagtacatcatcttcttatgatatcatagatggatctacaggtcatcctctaatgacatatcttcacaagttcggtggtttcttagacttgtatcattttctgatgattttattagaagcgtcaatcatcttttgacgattttataggatactcgttttggaaaatcattgttctgatgatagaatagatcaggaatcatctgctgatgatgatatcataggaaagattataatagttcacacatttcatatctgaagtgtcatcacttgtagacgattttggcttgttgttgactttcaataattgagttgtatataagtattgaatgtttggttttattgctttgtaactgttgacatacggtgtttgcctatctctttctgcacacttgatttcgtagctaaattccaagttctgttaaatattccaagctttctatctcaatcattgacaaaaaatgttccaagtagcaaacaatttactaacaagcactaatactacttcaaaagtctaaaatcagtggagtataaattttagaggagtaagattttgactttcaagtgttaagcgtagtttcaagttagaaatatatgtatttctagattcacaactaagattcgttactctatggaatgaagacttcatatttcacttagtagaatttggacaacactcatgaacgaccagagaacataattatgtattatatagaagcaacaccaactgaatcagtaccaagaatattaacagttaaatagagaaagaagagttttttttcgaaaataaatagattccagtgtcttaaggtgccaaaatgaggagttttcaatcacccaatgacatctaaacataatgacacaagacgagaaaatattcagagcttgtcatcagttttggtgcgttctcttttttgaggttttagacaagagcaggatactgcttggactgcagcttcacccttttcttgtactcaactggatcctgcacaataatcatcaacaatcactcgacttagttccttcctatgtttcaaaacctaatattgtgtttagagttttcatttctaaatgtacctgacagaagagatgataaccatctgtctgtgcagggtcagcgggattcggtgtgtcaagtaaatcctgaataccaacaagaatctgcttcacggtgatggctggtctccatccctatggatatacacataacaaaagagagcttgaggataaagctggcttttgctcatggagaaatgcaaagaaagaaacagtagagtacttacataatcctcgttaaggatagagagacagacagttccagatggatagacattagggtggaaaaacccttgtggaaatttacatttcggaggtttgctcggataatcctcactgaagtgcatcgttaatggaaagaatccaccttcccaatcagtctgcagcagagaaacatgtaaaattagctataaacaacagtaaagattgatattagcaattgctcttgcagtaacactcttattagccatgtcaaagtaagatacacagcagagttcagtttcaatgtcgtattcaagaccaaaatcatatgcaccaataaaaaaacatcatacaagataaacaaggagatagatacacagctactcttcccactaacattcatattagataatcttccacggctctatgtgtaagcaaatatgagagaatcatcaaacagaatcacaaagaaaaagaagggaagagactggtgaagcttaaaactttgaagaactaagaatcagaagatgataaaaacaaagactttagcccaaatcaataaaccctaatttcaatctcttttttgttgctactaatacaaaccagaagaaaacaagcagaggaataagaaaactgaagaaacctaatttcacgattgatacttaccccagctttaccaggtatagtgcaatgccacaccattagattcacagttccatcctgccccgtctccggctttgccacaaaaccctaaatttcaccatcaacaagaagaaacccaatcagtaatcagagaccatgaacaatcaacagaaacccaaaacccataaatcaaaatcacgaatttggagaaatagaagacacgaaatcacttacatgaggatgattcttcctccacgatttcctctcttcagctaaacgaccacgagcgattccactagccatatctctctctctctctctctttagaatctcactctacaatatctaaatctctctcttctgatttgtctcgctcgctctccaatctctatctctctatatataaactcgaagaagacacaaataggagattgggggaagatggaatgtgaagttacagatgtacccctatgttaaagctttagaagggtaatcggagtatcgtacggtccagatttcgcggcgaataaatgtcctttcgtcctacttcctccactttaatggttattgaccggtcaattattaaattttaaccaggtataattattatctactatatcataaaataaatgaaaagacgtaatgaaaaagtcaatggataaatgtggcgtgaaacctacgcgatgatacccaaaaaagctaccaaaagattctttctctgccataacgtatcatcccatttgtcacgtggcccattaccatatctgggcccatttactttgtgttcttaactcttaagcttgctttaattattcccctcttcttcttaatggttggtctttctagaataaaagtatctcacctggcaaacatttgtcaaacagaatggtcggaaaaaaaataaaatatcaaagctttcaatgaatttttgtgtaagaatgttatttagcgaacatatattcccaatatgatagtttttttggttataaccaactttggatgtattagaaaaatggttttttcttgaaacttgtatttgaccattagaccaaactgtgacaacctctaatctcaacagcaaccaacccaatggcaccaaactcctaaagctccagtgataaaacacaaaaaccagagaggcatagattatgacttactaaccagtgacaagaacatcaaaaccacacaagatacttctttactactttcaaacaaaagtcttaataatgttaaaagacagacggatacatcatcaccatcaccaagaaaagagtcatcatgacatttttaacaatgaacaaactaaaaagagtcatcatgatatttttaacaagaacaaactacaagtcttatagaagttttcttcggtattggaagcagtttttgcaggtcagagcatgcaatcagttcttgcaggaagccttctgaagaaattgagaggaacggatggtagtttgtatctgaacctcggatgtctcagagcatagattccaatacaaagagccacaacctggaaaggtgtcacatagagaatgactgcggcaatcaagcagaacaagacgaagagcgctgttgcacgcggatcacgccagcttagcagagactgaagcctttctccttgagttgctagatcacctaccactgtctgaatcctaccagcaatactcctcaacctgtcatacctcatcctgactatgtcagatggtcgggaagtaggaaaagtgtcgaactcttcatctagctcgtcggggtgggctgagtcagcgtgagagagacgtgtgtccatgtgaggaggatgcctcggtctccaacggtagtaccagataccgatgaggaagaggtagaggaagatggtgggcaagattagttcgggatagagcacaaggatgatgaacaagagatggatcaagactgttgtgattggattcttccagttgcagatttgttcaaaccattttcctactgcgattaacccactcaaaactcccataatcctgaaaaagtttgctttgcttctccgcatactccacatgtgagaacccacatcaagcatatactcaactacttctttccttagaggtggttctgctcgggtcagcctcatcgatacaatctgagtcgcttgatgcctcaagttatcaagctggctaaccgtcagtggatggatataatgcatcttcggtaagagaggctgtgagtacatatacatcatgttgagcaatgaagagcaagtgaatctcacagctaagtgaatttctcccattttcttgactccgttaggatggagcaccaaaagagggtatgaatgtgtataaactcgatcagtctcgagagtagaaagcctgattcttaccttcccgattcttgaatcttttgctcctccaatcttctcacctccatggagatggcagttatcaaaaactccaacagtaacaacggtgcacggatcaaaaacctcccaagtatattgctcattccatcttggtgtaaagctgtcaatgattgtccgagttcgaatccatttctgtccgtacttcgccacacaatatgcatctgtggttccccggccgtctttggttttcataggcatcagacctgtagcattcagtatccccaactccagtacaccgatattaggcttccatagttgcttcgctgttggtctaagatcactgctgtaatgcgtagactcatcgagaacgtgataccctccttccaaacatattctcatgtgaatcctgctagcgaatttggtctccttcttctctccatcgaccataatatgcttctcgagattgtaccacctgctgttcaccggtttatggtcaaatcttctgtccaaatactgcaacgggatcgcacatctccccaagacttcatctttgtttggagcaactctatcttccacgctgaggatcaaaggttcctcaaatggctctgctgcgacaaacatcaaatcctcattccacatgggattaatagtcctgctctgcgatactctagtcctcaacgcctggtttcccactatagccttcacataaacctcgggatatctttgcttatcagttggtatcaaatcttgagcttcaattacattaaccctgaggtaccaaagcttaggagaaagataaaccttggaacggatgttggcaagagcatcagtaccactaacagttgcagcatcagagtgccaagcttcagggaaagcttcatcagcttgagtaccaaaccaaacagccaacataagctctcccttgactttatcacctttcctatcctcgagcctataccattgcggagccaagggactatcaggaggaactctcttaggtacctcattcaaatcaaagacaacccgaccaatcaaatcatctttgacaaaatccttgtccttgacagtagcttcaaggaaagaagcttgaatcctatctttagaaaaggcgaaaacttggttccactcaggattagatttcttctcgaaatgcctagtggtgcctttgtagtttccaagcttaacctcaacataagggtcacaactaccagtcatatccttgccaggtaactcctttgccttaaccacacgaacatagagatactgcatttgctcaacaaggtcataagtactggtaagcttatctccagagagttttcctccacctagatgaggtctcgtctccttcaaggagaaatcttcaggaggtggtctctgcatcttgcaggctttaagaagacacactaaacaaagtttcctacacagttccaaaaccacaaaaacgattattaaacattcatattcaatattagcttaaaaaagagttaaaaaacttactagtggggtttgtcgagacaactaatttcttctccacttcaaaatcagtaaatctgagagaacacaaccatttcaaagaaagctaagtgaaaaaactcaggttttgggtaggtgatgaaaatgcagagaaataataaagttgaaaaagaatctcgaataaagcatcgtatattttttttctagatcttaaacaaaaaaaaacctcgttagtatctccaaggcagaatctaacggcacaaattcatgaatccaaaaaaaaaaaaaacatattcatgaagcaacttcatcgagagaaaacatacttttttcttcttctcggaaacagaactaccaaaaagacaatgaagcaacgcgaattacgctgtgggtgaagattttaaaacccaaatttccttcttttgtttctcgatttcaatgagagacaacaccaaacacagaaaacgacagagagaaaataaaaccatggaaagggaaaaaaagaagaagaagcagagagcatgcgagttggagaaaatagccattagagtaagttacaacgaagagaaccctctactcaataaaattctcaaaatacatggaatagcagttagacgaagattaaaaaaaaaaagggaaggtaaagaagacaaaccttagatcttgagagaagaatggatcagaataagagacccggaaacgattaagacagtctcctctcctcctccataaataaatactaaaagaaagagtctcctctcctctcttcttcctcgtttttttcaacccaaaattaaatttataaaaaattaaagagagaagaagacaagtaataaaaagcagaggagaagtactgggaaaagaaagttctggagagagtaaataaacattgaagaagggatttgtgtgtgctctctctcttgtgttttattgtcgtcgtcttcttcttctgcttttttctacagtttccttctttttttaactcggtgaaatacaaaaaaaagagaggcactgttgcataccaaatcgaggtggggtccatttataaataaaaacacgcaaagacatacttctctcagttttgaaataccctacattacacacgtgtgggagacgacggtcctgcgtaatctttcaacggtggtcaaattttacaaaattataataatccctcttattaacttactaaatatggaattttagcagacaaactattgcataattgtgcaattgatctggccactcaaaagaaatgaaaaacactatggaattgaagaagtcattggattcctcatcctcgagtgttttgggtgaagcatacgtacatttatacaaaagccgtgttttgctttttgctggaccccgttactattttttgttaatttttctggtcaataacgaaataaataagttagggggtcccatttcgttttatcttgttgtctgtctacataagtatttttattttatctttctttccttcaaaatttaccttaaacgtctaaatctctatcacgatccgaattcataattcctacatttatgtgttttatctatctagacatgtgcatgctttttttacttgatataggatttttttatcttcgtttatccaaacaaacaaataaatggtcactgcttttgctttttaacaagtttttattttctgtctatgtaaaagccatcatgattcgtttaggtgaatcagaagaaaataactctgggtaaaattccaaaatgtatactatcaaatggatatagatagacgacaagttttaaacgcgttagcgaactcttcttgtggctttggtattttagtttattaggtataaaatggaaatcatccacacttcggagcaattgttacaaaaatgcgattatctttctaccgactaatgttgggtagacataattagtttacaaaatgttctttttccatttgtcaccaaagttttcttcattattttatgaaacaagacttgggcagttggacatatatactatattagtagttaaattgcatatgtttgatctgttgatttgtatattcagttcttaaactaaataacaagtactaactatatttcagtatttgtatataatcatttagtatcgaaacggtctcgtggtcgtggcacctttaattgctgagagggccgtcttttacttttcgttctagctttatgatgtgccaccgagtagttaagagaatgcttctgctccaagtattttgacataatttaatcaaaagtattagctactttacacggacaataatctaattttataattagagtaagatagaaattaaagaagatattggtagtcgttgcaaatgacacgtgttgatcatgctttgctcgcatttgtatagcttcgacttgaaggatttcagtccaccgtacgtttaccacgatcgagtcacccactacggtcataactaatactataatttgataagtgtaataagaagacaaatgataaaaaaaaaagaagaagacaaatttgctaagatgacagtttgtaatccatatcttatcacatctacaagagagatatatacaactctttttcttaagagatgattaatgcgttaaacaagtttaaccagttatcaaaaatatgtaaatcttttctccagaggtttaaagacaacgtcacggtaattgtttcgtcgaaaaatgactattttaaactgtacggttcatggtcactttttgtgtatttacataaagaaaaaatattaaattttatactcagaattaggtatgggcacgaagcggatatccggaaaaattatgatatttgttattcgattcgttttaaacgaatacttgattttgtgattcgctttacttcgaaaatttccagatatccggaatttcgaatatccggaattttttgtgatatttgcggatatccgctttgatacatttaaatattaaaaaaatatgtatactatataactatatcatatattcaaaaaatttatccgtgcgttccttaattggtgtctccgtgtgcttttaaaataagttctaaataccaaacataaccgttgttggtatcaccggtcaacaaaatattatcaaactaattccaaaactaaaacccgatagttttttgatgccattgatcaaaacataacataaaaaaaaatgatcaaacaaacatcttaacataaaaacataaaatgacaacaatacacaaactatttatgatatctatatatagatatactatattttctaatatatataaaaagatacggatcgaagcggatattcgattttttaaaaaacaatatttattatttgattcgatttttacgaatactatatttttctatttgctttgctccaaaatcttacgaatattcggatttttcgaatcaaattaaatcaaataccgaatcgaaacggatcaaatcaaatcaaatcagaatattgagctagctgaatgaatgagataacctaagaatccaaaagttgatagtgttccctttccgaattccaatagtagcttgataacatttatttaacggcgataaattcaaccgttagtttgattaccaatcaaataattgcttgcaatagacggatgaaacgagtggtaagaataggtgattgaaacaaacggttaaaagcttaaacaaaataggtgagtttgcaacctctcttgttcaccattggaatattttagttatttaacgtttcttagatttttaaaactgtaatgtatttgaattatttactaaagagttttgtttttctttgttttttaaatatttttagttatttattaaatattttaatttagttttttttttttactgtttaaccgtttgttactaatcataactattatttaacggttcattttaaattatttatcattttttcttttaatatattttctaaccgtttttttttatcagtcttttttgtaagtgttaaataaaataaccgccttatttaaacgatattaccaattggtttaattttaggttgttcatcttttctaaccgtttttttctacccgcctttttctgtaactgctaaaaaacataaccgtctcatttaaacgatgtttacccattgcaaaccattttccttaaacaagcggacaatatttaaattgcaatgaaagcgagttatgagttcttttggcctaaacttcccaattttatctctctttttcccactaatcttctaacaattttaattaacagtgacaacttacaagtacttaggtaaccaagtatatttccctattgtaaaacctaattatgagttgtgatgatcaccttttctccttttgacgaacgcttaggacctaacttattgcaacaatggcctaactaaaacttaaatgcgatttgcattcaattctcaaatgggcctctttagttaacatgttatctccgttcatctgacgtgtcatagctcagatcaaaggttaatctactcgtaaatccaacgaccaaagaaacgaagcgtacgttactaacatacacgtgcacgcactgtaaccatctctctctctgctcttctccttcaatgaaatgattcgtcacccaaagaaagatctgcaacttcaccaccggaccagtctctctctatctcttctgtctctctacctcgcgcgacgaatcaatcatgactgaagaacaagacctcatcgaccaatcaccaccaccttcagcacccgaccctgaaccaaactcgagcacgaatccgaattcagtaatccatccaaggcgtgtgtctttcgagcacggactcctcccgatccagaaactcgttttcaccgacccgatccaaaccttagcccctgtcaagcagaagctagccgatgcggcttcgaataaccgcgttggatcggctgcaatcgccgacgttctccagatctccggcgaccatgcgcgtctcgttctcgagactctcggttcggtgcttcattccgagtctgaccctctggttcgggcgaaacctgaggaagttgattccgtcggagctgatttgcgggatcttattttgttcctgtacattcaatcgtataagaagttgcttcctaggacgcataaggactccgcagcggtggctgatgtttggccatcgacttcagcttttgatggatacttgtctgcgttatcgccaattcaggcaagtttcttactttttttggccctcttattataatgtgcctcaatcccagcgcctgcgatttgtttggtattgaaatggaactgttgtactcgagtatggaattggaacgtggtagagaataacttatttccatttcgcattgtatttaactaaaatttgcaatgcaagtttaagttttctgagtcatttgatttacctgaaacttagagttaagcaatgtcggaaatttgggtgattaattgaattgatggtggctatagtttcgtaacaattctcaatgaggaagatgcttacttgtatttaattgccagtcccctttctctgatgactctggggcaatggtaattggttagtttactaactaaagtcaaacagtcgccagcttgctttgttttgtggttcggaatctgattctttttccgttgtaccttattttgtttggtcctttcacgtggtttatttggtgataatgcttggtgtgttcttgaattttgactcgggtctccagtcctgtaatattctgtttcctgtgtggtatggatgttctattgagtcttttagaaaacagtcatataatcttaagcttttcagtgttttctacagtcactgttctttggtattctatcgtttctcatcacatgggtcgaaccaactttattggagctaaaattgttatttatatctccttttcatcatttctgcagcttgttcgcagcaacagccgtcgatttatgccatcacaggcagatgatgaagctcatcagttgtcatatctgcaaaaacatttagcaaacatcatttctctccttgcagagcctgtggagggagaaggagatgaatcattggtaagttctaatctttcttatattctcagggggtgtcactgttctaagctacaagaatataaaattctgatgttggaataagaattttttaggaaatgaaagagaacacaagttaattttttttttcttgtccaatatcgttcaggttttctctatggaggcgttcgagcatctgcgttttcttgttcagtttggtgataagggatctgatgtatctccattgagccaagctactcctttttttgcaaattctgatccggatatgcccgctgttccagtccccgcttcccaagtgcatgactggcttctgcaaaacatagcttccgctttagaaagcattactgagagaatttctggaaaagagaacggaccttctaacgatcaagatgatgcgatgtcagatgtttgtgctgctccgaacaaggttgcacctagtactagaggcccgtgtttaatcgagggagtctccaagacttcacttgttaagcaagcctccgatctaaggggtagatctgtgaaggtctgactgttccttgttccgtttttcttccagtcatggaatctctgtgcaagcatgtcaactccttgttttgtgtatttttcaggttgtcaattgccatgattctgtaatttatcttttagcaccattgcgatatgcaactgtgcacggatgttctgatactactatagttttgggagctgttggcaaggtatggaaacaatgcttcttccttctttatcttttctgaagatagtcaaagcaacatttaacaagttataatatctgccaacttttattaaaagatgtatcaaacataattccgtatttatttctgcaggcaataaaagttgagcactgtgaaagagttcatgtgattgtagctgccaaacgagtgtgcattgccaattgtcgtgaatgtgtattcttcttgggagtcaatcagcggccacttattgttggtgataaccacaaactgcaggtgaagcttctctttaagattgtggtttaatttacaagttttatgtcatgttgctcttatttacctttctgatattaaggtaaaaaaaattgagtggctagactttttactagatttagtttggttagtttggttaataagccgtttcggacacgtcatcaagtctagtggaaacaaacttggaggggtggctagactgctgctagatacgtttagtcaaatgttttcctcaagaaggttttactggtttttaagagtgcgggcattgtcagatattgcttctagtgattatgggcttctatttttaaagtgctggcatcaatttgactttgtttcaggtcgctccatataatacattttactctcatttggaagagcacatgagggaggtagggcttgagccaacgatcaacaaatgggacaaaccattggccctgggagctgtggatccacatgactccctgtcacatcctgccggtgttgctgatgcacaggctgaatcagctgcttctgtagaccctgaccagttcgtaaactttttggtacattttctatttgggtctaacatttacgtcaataattggtgaatgcttttcagtgtcatgaagcatctaatgacgtgtttttcggtggtatcaatgacaatggcacagatcccaaactggtttagcggcgcggagcttggttcgacgaaagacaatccatttccattgccagatgcttatatggcagctcagcagagaaacgtatgttttaaagttatacttaaccagataaacaaatgcatttgttatttttgtccatatctgatcttgtatctgcaattttttttgtcatcagcttaagaactttgaagaaacaagacgatcgttaaaagaggcgcctctagaagaaaaccggaaacgagagctatcaagtgcactccatgtttatttcaaagactggctttacggtaagaaaactttctctgaatcgatccctactttactttattgatatgcatcattcattaggttttgacttagtctatgtttttgttgcgacagcatctggaaatataaggcaactctactgcctacaaggtgactaataagaataatagaccaagcggaaagtgtcttgttcatgtagagctccttcgatcatatttggcatattgctagtgaagaaaccccaccccaagaccaaaagaaaaaagaaaaaagagaaatcagcctgattcagtgatttgtagtttggaaccaatacttcacaacgtaacttatctgcacagaaatactctcttaaagctttcgtttagattattgttttcttgatttctgcttttctttccttgacatttcaatccatcgtttttgttcccttctctattgaaaatctcatcttcaaatagagcatgatgacttgaattgttataagttataacttgtaagcaaaactgttttgatagatagtcttgtcttggtcaaatagatttaagtggacgcaagagttaggctactaccatggtaggtgcaaatttctgaagaagttttagagctccaaaatttctcatatttgcagaatctcatattcgtagaaacatccaaacaatgcaacataacatgaacatctcaagatacaaaaacagaaggacatgggatggaacagagatatccatgagcgcaggatccagctaataatgagttcttgctactttagtcattgtaatgtgtgctccattgaagaaatctctcttagctctaaagttctgcaccaactgttcaacaccaatgaacacctccaatggcagcaaaagtcagcccgtggcttcccatcatcttcaacgttctgatgagtcctggaagagcaacgtttctttcaatacgagggacgtctttccagttgcaaaaccagtcacagcatctttgaatgtcttcatcatcgctccattttcctcttccaagtatctcatttctgtaggatccatgataatttcttcaaccgataaagcttagtcctttttatgtcaaacgtgatctaacaaagaaaattggcagcaacgacatagtggagaacacagccaaatactattattattgggcctaattaaagcccattaatgattctctttttttttttgttgttctcccttcctctcagcgcgaacgcaagctccgtcggcaatggcagaatcgacgagaaatctgactgggcttggaggagaagcagcgaaagaagaagatgatgagtacatgggagacctttctcagtttattcctcaggaacttagccagacctccaaaagaaaggtatcttcaggccaaaattttcatcttcttatgtccacaattgtcaagctcctgaatccaaatttgtccaactgattttgaataatctccaacaaatttcgtttagtttgatagctgaatgagattttgggattatatttaaattcgtatataaatgcttttgcaggaatctgagaagaaaactgtaatcgtagaaccatcacggaagaagttaaaaaatctcaattggcacgagagacgaagattggagaaagagaggaaacagatagaagaagatgagcagacattggctcgtatagtagacactccaataggagagtctaacatagggtttaagctattgaagcaaatgggttacaagccaggttctgctcttggtaaacaaggctctggtagagctgagccagtgactatggatattcgaagatcgagagccggtgtgggaagagaggatccacataaggagaagaagaaaaaggaggagattgaggctgagaatgagaagagaaaagtggatgagatgttggaggattttgggtctagacagaagtctcaatggcgtaagaaaagagttttgattaactttaggaaggctaaggctgctcttgatcaacttgagaatgtagaagttgttccggagaagaaaaatgaggaagatgaagatggtaagcctgatgaagaagaggaagaagaggaggagatcactgaagaggtatgttctcctaggaaacaagagttggaacttttggtgtctttcatctttatgagtaatgggaccaattgattagagtttgagacactgttctttaggttgacaagtttagttttactggttgcaggatttgcaagaaatattaatgaaactgagagctgaacattggtattgccttttctgcgggttccaggtaactgaatgctttgaaatcttcttttatcgatgttttttctgaatcttgaatgttgagtttgtgtaagtatacactaatatgaaatttcacgatatgtgaatcagtatgaaacgactgaagctcttctatccaactgtcctggcgtaaatgaggatgatcactagataagccacactagtatggaagcacacaaacacaatccatgtctgcagaagcttcaggttgaaaatttcctgatgtggctgaagaggaagcaagatacagaaggaagactgtgtttgcagttgaggtacacacttagaatcttaaggacttgctaattctcatgcttttaaatagatagtaggatgataaaagcatgtggaactctgatttgataagacaatatattgatgataatgttgatgtttcaatttgatctccaagtatgtaacctgagtttctgttggatgcaaatcgtaaactatcgtagagatcatcaataaaaccaaagttcttaaaaagataaaaagccatgaaaaaaacatccaaacggaaaggcattatcgggcatcattgcctggttttaaagtagcacacaagagatagttgataagattttagtaacaaactgatgaagatcttaaaaggtgaaagagattagactcaaagagaccaattgaaatgttgaggagaggagtcataagctcttgtgttctcgggttccatgtattgcttcagaacctgctgatgaagatacagctcaaatccacccattgtggtgccattgcttatctggaaatctgctggctccgagatttgactcacaggagacatataatgtgaattgctcttttcgcccgcgatgacttcccaagtttggctgaggtactgctgatgtgttgagatgggcggctgatgggttgaaatgggcggtggctgagccattgtaaccttatcggagaatgagatcatcgagtcgaaaccagaagatggtcgccatgtatttgttggtgtctgaagttgctgctgatgaattgggtatgagtttgacagaagagagagagcacagcttgaatctgtgctattgttgtttatcatctctggacatgtagtaaagcttgagcttccatgtgataaaacattcatgtgtggatgggtttccctaactggattaatctgccacggtccaggccgctgcatcactgatcttgcggttgaccacgcagtaggatctcccaaaacgcttttaatcattgcagcattggggtttcctgacacacaggaaattcaataacttgtttttgagactcattgagctgaaaagggctgtgtatattgggatctaaccgtaaagagatggagcgattcgagagtaatgagaagtgaaaagagccgttgtgggttgtggttttcttcgtcgttcgttatgacaagcgagtcttctgcgacaacttcttttctccaagtcaaactcagaaagctggtgaaacctgatttgatataaagaaaagaaagcttcaaagaaaagcaacctaaataatgcataagacaagagacaagaccacataataactagctgtaaagtttaagttttgataagactcttcaatgacgttaagagccaaaactcaaaaagctcaaaaggaacataaaacctgaaaaaagcgtaaagctatggttcccttagaactattccgatcaccggaaatggcaaaatgagtaaataaaaggaagaagaaaaaagggggaaacctgctacattgttgacaaaacctttgatgaagaccagagacaatgactttagatgatttagagtgaatgcaacaaactttgtgtctcgagtaataagctttaacattgcttagatccattctacaaccttccacttggcacctcgccgtggtagacgacttacgaacggtattgacccggttcttgcttctggatccggatccatcctcgaagtagatcttctgaccaaacctgagtccaccactgagtgaagaagactcggtggaagaagaaccacctgactcggcctgacccgaacacattaacaactccattatggttttggcttcctcttactcagacagagaaagagatgcttctgctcatcactctctttctttctaagtactgaactctggaaatagtaaggacggaggagaatagaggaaagaaaatgtggttttgcagattttagatgttgctatcttttaaagaatcagagagaagagaagagagagaaagaaagaaagagaagctgacaaaagaagagacactcaagagtgattgacactagtccacgacagctacgtgtttttagcgtttgcgttttgggatgttggtgcgttttggtggtttttgtaacatctgaacaaataaacacaaaagggaggataaggatatttttcttctttaacgtacaaaatgatatccttaaacgagaccagaccagatcagggaacataactcccatgtaaaaatctacagctaatttattctaattattgtatactagttttatactactaaaatagtctaatgatgataaaatcacaaaactattgatctttattgtagtttgtaaaaatatgaatagatcacagacctataaatggatggctatttaactacttctaaatactatttctaattaaagagaaacaacaactttattgctcatttttaaaattctaaagtagaaagaattgaggattatgggcagatagaccagagtgttggaactcaactaaggatgtgactcttcaaaggaactagaaggttattgaacactttttgagtttagttctatttttttttctttctaaaaatactttagtgattctttttcttttaagcaatgagatttgttcttcttcttctcaccatatcctatgcaaaatctttcttgataattgaacaaatatttatgcaaaaagagagtatgggaagttcgattttcacggtcatgtatccatcagaaattgtgtacttgaattttcttagggttgtgtgtatcagtttgatattattccttttactttttgctttaagttcctttgttttgatttccaaaattctacaaaaatacaacctgaaaaaaggcctaaagccccccccccccactaatctggcttgactatcacaaatcttcttgatatttcttcctacaatgaaccttttctttttcgcttttcacaacttatgactgtttcatttttgcatagccgtcaaagagcatttttaggctccactttgttcaaaagaaagagtgagtttcagaacgccatggaaactaggagggaagagcaatatccgaaaaatcgaagttttgattccatgtaatgaaaccagaacgcacccgcatcaaactcgggtttataacagcaaaagtatctaacaaaaacaacaaaaaaaataccaaaaaggcggtttcaaaagcgttaagaacctcttttcaaaccccattacattcaacaacagcttcagcagctcgtcttggtttgttcttccttctgctcccattctgcctaaacccaatagacgacgatgatttcatagaatcttctgtgcttgattttgaccctaccccattctcttcttcagttatgttgctctctttagactccactggtttcttcctcttcctcccattctctgtcacattttctttacttgttactgaaccatttgtatcatcatccttgtcttcttcctcatctgtcttcttcactagctcttcttcttcttcttcttcatctttcaccggcttctgtggcctccctcttttcctaaaagctggaatcttttcttcctcgccgctccctcgatcttctctagcagtagcattctgcctcttgccttttcctctacctcttctcataactctattcaaaccaaaaaccaaaaacctcaagcaactagacaagaaacctgcaagttgaaaaggttgctttttaattaccagtagtaactcatacctcacaacaacacaatgaaggcgaactaaactcaaacactatagaaatttgttgaagaatgcagactaaaaagtgtgaaaagcaatgtcatttttttcgatatgcacaaaagtagaggatcattcaaactggcagacactccatagaggaggaactattcattgaagaatcaacacaagcgcaatcataaacacgaaagcaagattccatttttttcatgcattagaagcagtgcattgaacaagttatttaacaacatccaaatacaaattctttccaaaaagatctgaacaaaggaaacatatataagcaacacttgagtcacgagacattaaacaatttcatctcttaaaaacctatcctttagagctcaatagaaaccaagaactaagctacaagcaagttcaatcaattatcttccacgaaaactaattgcatgaacagtctaaacaagaaaacaagccctagtttccttacaatctcttcaaaacagagagacagagactcacctgtgaacccattggtcagactgagacaaaaaccccaaaaaacctataaagggtttctctttttactaatttatagttgggttctcaatcgatctaactcacgagtttctacagctaaaacccagatcagaggaaagactaagagtctaaagaaaactgaccaaaccaaacggaggaatcaaatcgaataaaaatccaaaggataagactcaagttaaaagaaagagatctaagagaagaaggaaggaagaaaacgaagagaaagagcaacagctagagtactagtgttggttgaaaaagattaaagttgattgctttcaaaaggcttctcttttctttgttctagcttctgtctctgagtgaaacttaaaagaaaaacgtaagaatgacgctttttcttctcactaccatcactgagactgactaaaatggatcttaagcccgttgaagatggatacggatttcacccacgcgccccctttttggcgcgtgctttcacattctactcgttttcgaactcgttgggttcggttggataagagacgacagctaatagccgcgtttcatccaaacatttcaaaacactttccacgggcttcttcttttcctttaacgtttgggctttggcccattagagttcactttatttgttatctctctattctctctatctatatactaataatattctatatgtcaaaatcatcacattttgtaattcagcttcatcagctatataaattgaagttacatcgcttcaaaattgttttcaaaaacattcaacaaaggattttgtcaccagactcaccactaacaactacaaaaaaaactaaaagagagagacacatatgattcttcccgggcttcttcttttactgggccttttatgcttatgcccattagagttcactttattgaacccgattttatatgaatagtggcattaaaccatttcggtctagtactcggttatgaatgattcattcattgagtaagaaggacaaaaaggtcaaagcagaaaaatcataatttcttcggtcctaaaccctactcaacaatttagaaaccctaagttctgttccggtggtccttgttatttttttttattttggtgttgttcttaaaattcagttccaaacggaaattgatttcttcgtcagttgcgttttttaccaacactcgaaagcagaacccatattttgttattgaatttgggtttttttttgtctgtgttaagaagattaagtaggaggaagaagaagagctagttttgcgagaatgaggaagaaggttgatgaacgtatcaggactctgattgaaaacggtgtcaaattgagacaccgttccatgtttgtaatcattggtgacaagtctcgtgaccaggttctcgaaagttttctacttggacacttatctccctgagagaatgttttgttggatactaaatcttcaaccttttttttttctctaacagatagtgaacctccatcatatgttgtcaaaggcagttattaaatgtaatccgagtgtgttgtggtgctacaaggataaacttgacattagcaggttctgttcttaatcccaaattctcaaggctttagatgattctcttttagctcattttatgcttgtgatatatatattgagaatttagctgggcacaagtgtagaatggaatgtgaaatttctgattgtcctttgaataaagaagatagcttttttcagtaatggtgagagtctgtatcgtttgtttgcagtcataagcaaaagcgttcgaagcagctgaagagattgagggagagaggacagttagatccagagaaacttgacgctttctcgcgtttgcttgatgttggaagagtcactcattgcttgtacaaagattctgaacgaattcttggaaatacttttggcatgtgcatcttacaggtacttttcttcttatttatattcatttaggatgactgccttatgtccctgtttcgttttgtgagtaattgttactatttcttcttgataaattcaggattttgaagctttaactccaaatctactagcaagaacaatagagactgtggaaggtggtggtttggttgtattgatattgcgatcacttacatcgcttactagtctatgcactatggttatggtatgaaccacagtttaatttcttattttttgagtaagtgggagaaaagcattatctaagtaatgtgacatgacttttttttattaggatgtccatgacagattccgaactgaatcgcattctgaggctgccggccgtttcaatgaacgttttctgctttcacttgcatcttgcaaagcatgtgttgtcatggatgatgagttgaatattttgccgctttcctcgcatatcagatctattactcaagttccaacagaaaaggtaattcttgtagcaaattgagagaatgttatccaaagttccaggtagaattgataactttacaatgttatgtgctactaaaggattccgaggggctctctgaggcagagcgggatctgaagagtttgaaagaagacctaagtgatgattttcctgttggtccgttaatcaagaaatgttgtacattggatcaggttcaaagctatcaattttatgtcttgctaatgttctttcttgttgcatggttgatattaaattgtaggagattctgcgttttcattttgtagggtaaagctgtagtaacatttttcgatgcaattttggataaggctctccgcagcatagttgctttgattgcaagtcgaggacgtggaaaatctgctgcacttggtttagctgttgccggggctgttgctgctgggtagatttcttgaattaattttactatatgttcttctactcatcagtattaatttttctggatgtttgtgagaattattgatgtgtgatttacttgctcttaggtactcaaatatttacataactgcaccaagcccggataacttgaagacattctttgagtttgtttgcaaaggctttgatgcacttgaatataaggtaatgcaaagttcttttcctacagattatttttatattgtatttgttctatttcattgagaagaacctgcaaggtgagagacatatgcatagttattgagataattattgaatagacctacactatctcaaggatagaagaaatcattaaaccattttgcgatgtggtcatatatggttctaaattacgttccattattatttttataggagcaccttgattatgatgttgtgaaaagtgcaaatcctgacttcaaaaaagctgttgtacggataaatatcttcaagcagcatagacaaactatccaggtttgttaatccctcaattaattcatgatcttcaagctgtgatttgagtccctttccgacgtgttccatgctcttgatattttttatgcagtatatacaaccacacgaacatgagaagctttcacaagtagagctgttggttattgatgaagcagcagctattcctttaccagttgtgaagtctttgcttggtccttatctagttttcctatcctcaactgtcagtgggtatgtgaaactggatctgatgctattaaaaagtcatatgcatgttctggttttaattcagggataatcatgctactgtatgttacccatttttttgtttttatgtttaaagctatgaaggcactgggagatctttgtccctgaaactcctccaacaattagatgagcaaagtcgggctcctgctactggtcttgaaggctctggtatgtaactgctgcaccttgctttcattcttggctatgaaaatgattagggacattttttagagaccgctctatcatccttcagaggatagactcgtttttcttagaatcatcgctcagatacccctatttattgtttagagcttcgttttcattttttcccttaaagaggcttacaaagattaatctaaattccatgcaaagtagcccgctttactagtgtctgatgaattcttcatatgtagcaacgctaattatattcgcaggacctgcattttgtggcagttctagttaatgtgattcattcccctgattctctcaagtttcttcggacaggttgtcttttcaagaagatagaacttactgagtctattagatacggttctggagatccaatagaatcctggcttaatggcctactttgccttgatgttgctacttgtctgcctaatcctgcgtggtatgaatttttaactaaaattttatagtgtctactatcctttctagtgttactgattgtctagaaatgttttttatttgatttgtcttttctttcttctttttgtgtagccatccttcgccaagtcagtgtgatctctattatgtcaaccgagacacactcttttcttatcacaaagatagtgaattgtttctacaggtaaatgtagttgattgagatccgtacattattttgacaatagactgatataagtgcatcctacagagaatgatggcgctatgtgtctcgtctcactacaagaattctcctaatgatcttcaactgctggctgatgctcctgctcatcatttgtttgtgttacttggtatgctgcttgtccttttcccacacctaatttaattttcagaactattcctaactgcttttaaacgcaggtcctgttgatgagtcccaaaacaagattcctgatatactctgtgttatccaggtatatttttgcttatcctgtgctcacattgacctagaacagcgattcatcagtcttcatcaaatggactaataaagattaaagtatcagctatcagtctgttataactgcttttttccagtttttgtcgaaaatcatagtttctctagcttgtgtccttatttatatgtgtgattttaagcatcattgtagctgttatattcaggtctgtctcgaaggaaagatatctgagaactctgcccttcaaagtttaagggatggccattcaccatacggagaccaaattccatggaaattctgtgaacaattccgggacactgaatttccaggtttctctggtgctcggatagttcgcatagcagtccaccctaacgccatgaaggtatttatttagttctgctcatatttttaattgtccagttaggttctgtgtgcgattaacaagcttctgattaccctctttgtagatgggatatggttctgctgcagttgaactcttgaccaggtaaattcatggaatgtgcatacaagtttgtaatgatgttatctcatgcattacctatagcaatgttatatgttgttcttgaaattttggactttgtactcttaattaggtgtggtcattctcttactaatactgattgatatttgcagatattttgagggtcagatagctccaatctcagaagctgaagataaagttgatgtggagcatgcacccattaaagtgactgaggctgctgagaaggtttctggtttttcctatatatctatttatgtgggctttggttgttacttagtgcagaatctgcttcttttttaagtttactataatagttatttctctgtttccattcttatctgaatccatttttgacaggtctccatgctcgaggagcaagtaaagcctcgtacaaatcttccacctctattggttccactccatgatcgacgacctgagaagctccactacattggtgtttcctttgggcttactttggacctcttcagattttggagaaaacacaattttgcgccattctacgttagccaaatcccagttgagaatatttccatcctcgcttatacaaatttcttttttaatagttgtttgtaacacttattatctgtgtttcgatcagagtgctgtgactggtgagcacacatgtatgcttttaaaacccttaaagaatgatgaactagaagtcaacgagtccgatgagttgggattctttactcccttctataaaggtttgttgattccttgatcaagaactgaactttcactatcttccaagtatctcataatttttgttcagatttcaagataaggttctctaagctgttgagtgacaaattcaagaagatggactataaacttgcaatgaggtaagcaataacatttttctgtctttactttttgataacatcgatttcgtataattatttattcgtgtcatattattctttgtccagtgtcttaaaccccaagatcaacttcgccgaggttgattcttcagggagttcatcaggtggatttttgaagacactcaacggcatattatctccgtatgatatggagaggctcagagcatatactgaaaatctgactgacttcaatctggttagatttcttctttcttttaagaatggtttacttttgaaaatgtctgtgaactaaattgacatttttggtaatgattctcttggaaccaaaattggacgttgaaatggtgcagaagtaaaaacatatgcctttgttgtaaactgctttcagttctccttcagtttgtaacctgtttcattgtcttatcgttgaaaggtttatgacatctgcaaaacgctggcacatcagtattttgaagagaagctccccgtatcactgtcatatgttcaagcatctatattgctatgcttggggttgcaggagacggatttctccagcatcgaggtaacatgttttactctaattttgaagattgcagccagctggttcattatgtttcaacaaatccatatttaataaacatgcaaacacatttgaatgtttcagagacaaatgcagttggagaggggacaaatacattctcttctcctgaaggtcgcaagggagttatacaaatatctcaatggagttgcgggaaaggaaatcaaatcagctctccctcgtttgaaagaggtaacttcatgttattcattactttgtaattggtcataatagtttacatttacgaaaccaagaacaaagtttggatagtgtgcagaaaacttttagttcaaagtcttgagcattcctgagagaataagaataactaaaagtcgctcaagctgtttatagttttgtgtttgcaattgaacagtgtcatctgttttgcttctagagttgaatacttgtaaaaggctaaattgctgctcatggttgcagagagagcttaccgctcacaatgtatcagtcgacgatgatatcagggaaggagcaaaacaagtcgaggtaatttctcctaccaccctgtgccgtgaaaaatgttatatgtgttacttcggttataacattgtatgaaattgtacttctttcgtctttaaaggaacaaatgaagaaggagaagattgaaggattaatggattctgagcttcaacaatatgtaattggggataaagaagcagaggctctgcaacattcaaagatctcttcaagtggtattatcagtgttaagtctaccaaatcagagaatgagaacgggtttgacaaatccaccaaaaagagaagcagtgataagcgttcctcttcttcctctaaatccaaatcgtccaagaagagaaagagcctgaaggagtgaattttaacaaatgatcaaatctgttttgagcatgataagctatgagattttgttttgaaatcaaaaattttggttatgtttgttgtaattttgagttataatgggaaaatagacgatgatacggctgaaaaatttaaagcaaaatcatagatgtttaatttcatacttatgtgtttcgagtcttcaaaaaagagagatcagcataaagagatatgtcattttaaactggtccaaatctacaaaatatattgatgttaatgcaaatatgtaatgatggcttggatcgagtcagagaaggtggatacaattgatgatgatgagcgtaaatgattgaaatttgcaagtgatatgatgtagtgaaagattttcaaatgattatatgatgatcacttttatttaatttcttctatgactttacaaactcttctatcaatttgcttctcttagttatcaaaaacaaaaaaaaaattgctatcaactatttcgcgtgtatataactttgagtgtatgggtataacgtactaccatccatttctattgaatgtcgcaattttagattcctattatatgtttttattcttgaaaaatggccactccacgattggatttctacttaagtaattgtatattaacattcacaaaataatacttaacctatgctgaattgattactcggtcccataaaaatattcttacaaataagaattagagatgaacatataagcttaaacatcaagaaaaatattccctaaccaaaacatgtatgatacttttgtattaaacatatactcaaatttgaaagttttggtatccaaaatcttagaaaggattgagatggatactgatcatatgccaccgttaagaattatgcattaatcatatgtttactttcgcacgtatatgtgatgtaaacatggaaccagctggttaacaaaaggtaaaaatgaatgatagaagaaaagaggagtagttgcaagtagtggttaaaagattgataccaactcttttatcgtccgtgtcatctatggatcctccgcacgcgttgctgatgcactttggagacacctctttcttaccttgccttcttctccactctcttctttcctccttcctctatttcttcctactttatgtatgatatttgtacattttactttacaaacttatgaaaattgaaatgatgtagctaaattgaagtaagttaaggttagttcattcatgcatggatctacaagattcattgaatatatacgcatatacggaattgagatcatattatcttaaagtcgaataagactcttacttttaaaatatctagaaattcgaactatcacatgtacacataaagtttaggttaacaacattaacacaaaacataggcaggtttcatgtcatggccaaatttgtattgaaaataattttcaatgctctaatttggtgaacctttaaagtcaaagagttcagttcgtcaatagaaactaatttggtatctaattacaaagaatgatagtaagtttcttagaaaataattagagcttttttccacaagtccaaaatgaaaatcgtaatgtaacgcggaaatttgcataaaagttacttatattggtcaaattgatgtatgtgatgccaattaaatgtctttcagtatgcattattgttaaaacatataccaaacaacaatcctaggtaccctaatctactaagtactaccttgaccagttgataaagataagtcaatacaatatactttttgtaatcgataggaagggttctaagagttacggtgatttaaatcaaaattgttatttctatctcattatgcgtcagaaactcttaataaagtttgattacgcacaaagactaaacttcaaaatctttattgcattgctacatgtataaatagataaagaggagatgttttagttatagttttgttgttttagttttagttttcacaacatatttatcagaaaacaatataagtcaaatttgacatgggtatataaaatttaatacagcagatgtgcactgcatgtgtattttggtctgtgtcttcgtgtaagatgaaatccgagaaagacaagagctccagatattcaggtggccgatcaactggaaatcagccactttgatttcttctctaatttttattttccaaatctcgaaaaatatttaatcatctgtctaatatcttaaaaaggagtatactgttatctttagaccagagccacactggatttattattattattaagttagcaattagttttgttttatataatcctcggtctttgagggttttcagcgaagcttaagccttaagcgccgttcgcggctatttaaaaaatgactataccagacgaataaattatttttttgtccacaaacaaataatgctatattttatattttttatatagtttttcatgtataaccatatctttctttcttcttattgttatagagttgtcttcataaatggataaaacatttcaactttacaaacaaaaactgttagaatatttgattaaatttggatgaacgcgttacgcgtattaccgatattaagttctatacgtctttctttctttagagactaatattgtgagtgtaattttatactcccatacatacgtaattaacgtatgagtgtgtgtgtgtgtgttgaagacatgtgcttattgggatttgtttggcttcaagaacccctagaaattcctgcaactggtccaagattccatgacgacaaggacctttggcctaatttgcattgatccgattgcctaaattttaatcccttcgtagatccaaatgaacaccagccaacaaaataaacatcaataatttactttctcattattataaccattagtattgtgaaatcataaatcatttatatttttctggctgatacacgaaacaacatctttaagtaaggccatattttggcatctgcctccaaaacttttagcttttacattttacattttttatttttgtacgcaggtggtgtacataaaaaatcgaagttattcaaccacttgattgcggtattattgtattgacgttaaatatatatttttatgtaaatataatagttatcaatatatgtatttataaaggtatattgatggatatatcactctaagtatgtaactagcagcacaatttgaatgatgccgaatttataagtttcagtcatgaagactaaactcgagaatcccaaattttgtttatgtgttgatcagtcagaaataaaagaggaaattttggtgaaaacaaaagtgttggatattttattatattatataaatcaatgttgttgatccgatctaagtttgggaaatgtgggaatttggttgaaattaagataagtgtataaataaggatttaggagaagttgtagggtagagttttggtcttatttaaatcaccaaacaccttgatttattgatttaactactgtaattacgtctataaaatagtatatatatagactctcagaaggttgtctgcgtttatagtaaactaacttaaattaaacagaagtgaaacatgaagtagcgaatctgagattacaaaatagttaataatattaatataacgacaaataaaacataggaagtgtttggtttctttaaccttacgcaatgttttaattagtttgaactcttcccgatacctaattgggagttgaaaaattcagtcctcagccaaacccgtttgtggctcactctacttcttgtgttacgccacacatatacacataatcgtttcacttttctggcaaaaaaccaaaacttactcaaaatcaagaggtatcatatttgttgttttctttaataaagttggcttccaattaatttgtactatggaatcatggataaaagtttcatgagtgaaaagtaaatgaccttctatctagctaccacgagagatagtcatataattaagttttgtgaacatatgtcaatcacaaattatatatatatatatgagtatttctatcatatattcaaagaagacagaacaatatatgttgtatctataaatagataacgttgtgtgtgtgtatcaatataatatgctaattgaaaaatagaaaactaattgtggttcacaatctattttgtgtgtctatcctaatcggtaacttaactcaaagacacctacaactatcttatccaagaccttcttcctttacttataagcattttttacaagtctatgacaacattttcttgatagaaataacgttgtaaatagcctttcataagattaacaatatatcaacgaaattcgtcatacattcaacttcgtggaaaattctacggaaattcacattcgctgaaaaaacaataaagactatgcacagtcacacacaagacaatcatattcggagaaaaccaattacgaaaacgcccactagtccaaaagtttagttaagaaaacaacaaggaaatgagtggctaaaaagtcaagaaaatcctttataaagtcccgcgagtgttgatcactttaatgcaaacagagaaaacgaaaacacaataagtgtgagaaaagagtctctctcttgagtctttaagtcatgcagctcaaatcatcatcaccatcttcttcttcttcttcttcatcatcatccatgaaactcaaaactctaatccaaaacctcctcacacaccctctctaccgtttcctaagagctcttgcgaaagccaaatcaatctttctagagatctcaaaacacaacagcaacaacaagaaacgaaaactcatgatgctttttccaacaaaggcttcaaagaaccaacgcaagatcttcttcggatctttcagattgcattacaactggtgttcctctcatgttgttcctgtccctcaaccgtttcctttcccttcttcttacatcaatggtgaagaagaagatgattctcagctttctggctacctcgagtggcttgaacacaagaagttcgatgatgtggaagagatcggagatgttgtagctgatggtggtgatgacgatattgatcatttggcggatatgttcatcgctaattgccacgagaagttcttgctcgagaaagttgaatcttaccggagatttcaagaaatgttagaaaggggtttgtgaattatcagaggtgaaacatagattttgggtcttgtctgattaattgataatcatgttgtaaaatcttagctagtttgatttgataatatacagtaccacgaggtcgtgacatgtgtatcttgaaagttttggggggtaatgtacgagaagttgaaacttttgggttattagtgaaacatttgatattgtgaaaacaataattattgttgtccatctaattgggcacatctcttaagttgtgagtttgattagtgtttggtatattacgtccaacttgcctaattttttttattatcttgagaaagtttaaataaactaactaaacgaggtttaaggaatcacaacaaaaagaggaattacctctattaattgaaatttcgagtgttaatacaatacatgacataattaaacgtgacattaccgagtgaattgaaatttattactataaatacgtttttataaaatagtatcatgcagtttccagagtctgtagacagtagacacaaagatattaacgctaaataacaccaatatttgtattagtaagtggaatgtgtaactttcaatctcgtaaatatcttggatttatgatattataaggaaaaacatcgtgatcataatagccaaaagagactaaaaggatcggacaaatctcgagaaaaatgatctaaagcacaatttactgtgccttctcaactactaacagatccaattttcacctaattttggactttatagggactatgttgtggtatcctcctgtaataacaacagtcatttctccaaatgattgcatatttacctataaataatatataaaaagactcgagaaataatagtaatgtagagaaaatacacactgaacatcaaatcagacgaatttttcgagttatagttttagcgttgattaatactcttttttcctttaagaaaataccacttattccgccatgtttgtttcttccaatgttctatgcatagtttaacataattaagaaggcctttaccaaaaaaagaagaagaatagtttaacaacattttctcctaaaattcattaataaagtagcagactttatgcgtttagttgaaacttttgtcgaattaatgaaaattttgtagtatttattttgctaaatatgcatgaggcaggcccgtctcaatagagtactactatagtctatagtcaattttcgacaccggccttagatattgtttcgttgacttttgcagtttataactttacgtagcatgtaaattcaaagtaaattctatatgtttgaacataatgcggatataatacgcacctgtaataagaaaattggcgaggttcctctgggtggtctgtagtcaacacacttttttaatattatgctatataccggaaattatccaattaaaaattatccatatatttagttaaaatataaataaatgaaaaaaaagttagcaaaattgtgcctacatttttttataaatcaaatcgttaataacaaaggtgaatcgattggatatataaaccacactacgtaaacttggaattatttatctattcacatttaattcgttctcctatttcttgaaaagaaaaacaaattaattaatactccgtaaattagtgactcattcttcaccaaataaaaataaaaatagtgactcatttaagtaaacggattgttacacaatcattaacttcttccacaagtcatataaactcacttctgcgacacattcttgagccagagatcgtttgagttctttaaaccacaaacttcatctctccggccgggttcctctgttctataaattctctctctagtctctaatggcggaccagaaagatcaagagccaaatcctcccgccggtacgtcagaacaaaacttccgatgagttgttttgtattgaattctcccattgtagcatttcgaaagcaatcttcagtaactagggtttccgagtatgaaataattagcttgggtttttggattcctctgtttttcgttttctttcttccattgatggcaacagctgctgataaagccagagattctcgtgatcttgattctgttatttctcgatcgtgatgcagcaaagccagagtgtctcccattaaagaagagagcaatggctgcaaagtcactcgttgacatagcatatgagtctgactccagcagcgatagcagtgacgaaggagatgtgccgtgtttacccaaggatgaggtcaatgaaaggaaactccaaaatctccagagaaaagctttctacaatcttctccaaactttcgctttcgaaaactccacaatgtcaaacgtaacaataacctttctcttggttaaatctttcttcttctttgctaaattattcgctctgtttctgaggcttgtggtcatgtctttaattgttttccagaagaggactgagatcataggaaaactgatgaacgagtgggggattgctaacgaaactcatatctcctttgcggatcagattcagaagaaacttctgactctaaaacaaacgtatgtatatcctcttgtcaaagctggaagatatgatctcttccttgtttaaaaatcatctttgtcttctcaggaagcattctggtgtgaaggaaacgcagataccagcgacgccattgaccaacactgtaaggcagagaatttgacatctctgatttggctttaattaccgcagagttttaactgtgtttacctttttctctgttttaaggcaacgccgagtacgttttttgttcctaaacctgtcaaaagctggggcagtgttaatccagagtctcttattggaaaatgggtcagtataaggcttcctgataaagctaagttcactgaatacatcatcaaagcatatgatgcggaaaaggtactaaaccctttcttatatctcatgccttgttccatcagactcaagccgttctaagactttgcaatatatctctccaggaaatgcatagcctattgaccgaaacctcgaacccaatggaggttgattgcattgacccgtttagatggatagatatcagagatgtaatacacaaactcttatcatctccatttcatcaaatcttcaaagtctttaatatcagaatgctgaaacatttgatctcaaacgaacttattgtagatttcgcctaacgatatcatgtgggaaggtggacaaaagccaaactttgctgctcccaaccaatctgctgcagctacaggtcaatgagcccttttctgaaaacattgacaaggtaactttgccaatcccaacacacacaatttcagtgaaactctaatggttttggcagaaatttaaccagtgaagctctcatggttttgatgcaggacaaagctgagaaagaccaagaccctcttttgcattttgttttgagatctttagttacttgtacaatcacattacacaggactctttttttttttggtgttgtttgctggaattagagaagaaaggggtcagtgttaaagtgtaaaaaaattcaaacttttgtttttgtaaattggttgcctttgtttcttgttagcttatctcatctataatcggaaaagttttcgttccggttcattggtccagttttatgtgctttatcgccggagctatatctataaatgattgtcatttaacttagaaaaacattttagtttttactaaaacaatttgttagtagcgcagttataaaggacagtactttaatgccaaaaaaaataaaatgacactgactatttttcactagccaagtattaattcttgaaactctactactattatccacaaccgttggattatagttttaatccgtaactaatccagtcaccaatccaaacagtattgagtaaatgatgttgaaattaaccgcagactcactcttcaattgctgacgtgtcaagtgatcaagaagtaccttcttctacaagaagtatagtttcactattttacgttcaaaatctcgaaaagcacataaaaaaaactttcgtaacttcttctcttatcgacgacccatgcaacgtttttgaagatccttctatctctagggtttctctcaaacttcttcaacaagacgcttctctccgattcctatgttctcaacaatgtcggaccacaaagatcaagccccaaattcttcctctcgtaagtctcttcttcactttctcatgggttttgcgatttcagcaatcagggttctagagtttcggattcctctgttttctctcccattgatggaaccagactgatcggtgatgaacggtgatggattttcttctgatcttgattccgttgaagaagaatcaactgatataccgatcaagaacacagagactgtgccgagctataaaggtgacgatgatatcctgttcagccccttggacaagaaagtgaaactcagcatgctccaggatagggcttactattatgttctccatgccttcaaagcagaatctcctgcaatatccagcgtaatctaatcgttcttgttctgtatatgcatttgattcgcttcttggaacttgagttcatgtcttctcttcttcagtcaaggatcgtgatcatgcaagaactgttgaaagaattgaagattgagtacaagactcaccagacttatcacaatgcaatcgaagctgatccaatggtcctgcaattgaggtatcttaatcattggttttactactgcaacgatgtgatcttctccccttgcttctctaagtttgtgtctgtttctcaggaatgtttcattggcgtctgatgagaaggaaatgcagaaacttactgtcgctgaagaaccggaaattactggcgtagatggccaacctctgataatccgtatcaaactgaacaaggatgacaatgccaaaattgtaggttttgataatcatcattttccaactcctaaaaaattcaatctggctttaattctatgtctttctgattgcttagcaagacagggttttagctcctgcaaagataaaagatggaaaggttttagctcctgcaaagatacaagacgaagaggcaaaaccgagttctacttctgatgattcacctgactcgagctggggccaggtttctcctgggtctcttgttggaagacgggtccatatacaaatgcctgacgaagacgagtacattgaattcctcatcacaaagtatgacgcaaatacggtaagtcacttcatgtttacttgtgtgttgttcatcaggtcagatctcagcccttctaagaaatatagttttgaatctacaggaaacgcaccacttgttgagtgctttcagcaataaggattatgaggacccatgcaactgggttgatctcagacatgtaaaatcaaattgttcttcctcttcttcaagttttatattcgtccccttttttgtcagcagctgaaacccctgatctcaaactctttgcaggttcaggcagaggatatgaaatggccagagggagatccagatttaccagtatggaaatgctctcctaaaccaggcgaaactctcttccacgaaaccagtacaactcaaaacaagaagcaagttcatgaggtatcttgctaacagctccaacaaattctcttgtaatgctaaactctctcactgacaaaatttctcaataaaacctctgttaggttggcaaaactagcactgggattcctgtcatcagaaaagttgataagggaaaggctgttgttgacgcataatctccaatgcagtaggatgctgaagatgacagatgcatgaaacattctacattggaacgctcttataaccttgtttgagatctctggctctttctacggtctactaaactcatattttgctgctatctggaattagagtagtgtataaacaattccaatactcttttttaaatgactgcctagtacacttcttagaaaactctttatcccatagaagatagttaagtattgcaataactcatcacctctttgaacgcttcttcggacgagtagaagaacctgtttccttttcactagtttcactgtcccgctttgccatcagagaagcagtgcctcttttagaggcgacaccactgtttttctttgtaggactacccttttcaattgttggccttttcccagttaatcgtttctgaccagcaggcagttttactgcatccactttctcactcttactattacttttcctctgttcagctcctctctttccattagaggattcagccttcactgtctctacgactgtttcagatgatgaaacccctttcattctcttaagaaaactagcagcactttgcttttttgagccaccactggtgttgatacccttcttttgttgaacacttttcttcagcacagagctaccgtttggagatcggcctctattagagataccagcattcaaactggtcttaacgtttctgctccctacttttttagctgttgagggtgctgctcctctagccatcttcttagaaacaataggtttctcatctttatcagagggtctcccttcctcctcttctgaaacttgcttctcatcaactgttggaactactctagtctttttcttcaaagtttcagtgactgacgctggagatctaacagccaaggaactacgtttccgacaagctataataggcactgaaagtgttggtttaagagaagagactttgacttcctccttagacgtcaccaaggcatcctcttttggtggtggtaaggtttgtttaggaatcttgaaactcatctgtttcttgatgagttggtaaagctgttttgctgcattaaactcaggcgatggctcgccatagaaaactctcacattgttgattagtagcagtaaatcccgaaaaaacttggtcctggcagttttgtagtaaccctcttccacacgacttcgaatcatctcaaagtctatgtgttgccttattatcctatagtagtcggatgtttcctgcaacttcacaatcaaacaaataagactcaggctttaagacacaagccttttgaaaaatgaattaatcatgatactaaaataaatacagtagaacatttttcatttaaaggaaaaattaaccatcggcagattatcttaaataaaggattgtttattatagaatcaaacataatgtagaaaattatttttgattacaaaaatgacagaatttgaattgctgacaatgtcataattttttttacctgggtttcgagccggcgcgaaaagtgagagccaatggggtgagactgaagaatctcgatgaaatcactcaacggctgagattcaacgaagatcttattgacggtgagagattgatctttgttatccggttggtcttggtctaccgtctcctttctcgggaagctcgccgagctctgcccatcactcgtttctttcgtatcttcctctcctttcgactcgtccattgactcaactaactcaggcgagtcatttccctctctttttggttctgctctatccgattccttcgccacgctctcgcaacttcctctacccgaatcctctcttgccggcttctcgtcgttgtcttctccgccgatccggttcggttcttcgtccactggttcagcgattttaacagctctgttcgtgttctcagatccggttccaggactattatcattcggatctggagaatttttcagctcagtaaccggtacgccggagttgttgcccgattcagtgtggttctctttcgtctccgcgattctatctagatctgaattctcagttttcaagctcttctctctttcatcttccaatgttttcaccttcaactgcaatgacctgtaagtactcacaaatccacgattcaaatctggaatcggaacaaaaaggaagaaaaaaaaaaccaatggttgattgaaatttacgagatggatagatcgtaacgttcgacttctcgtcggagttcatcgacacggagctttctcaactcctcaagccaaggaacggaagagatctcggcggcgagggtttcttcatcggcagatcctggcgagaccaggttacgggagaatcggcgcttgagatcgttgtacttgtgacgacagtcgatggcggtgagtgtacgaaaagtggagttctgtttatggacttcagaagcgacggagtcccatgaatcagtaccgtgacggtgaacggcgcaggcgaggaggagctcctccattgtgctccacgtttgtttctctggagaatttttgtcgttttctgattttgccattaagtaaatgtaaaaaggaacaaagtggattttgcttattgtcacttctccaatttgtagaactgaaatagaaataatcgtcttctgcaaatctttgctctaggcctccactaaaaaaccttgagactgattttttttttttttttttaatctgtctgacaaagaatttatttttatttatgtaatgtttcgttgataacatgttcgtgcaaaggcgcaccaattgagagaatgttgaaaaactttgctcgtttttgtcgtatcacactttagtaggcccaacctttacaccgaatccattacggcattaccggtttggaaccaaaagcaccaagagggtccaatttcgtttctcataacatttaaaattggattgtacggaagcagctaatgtttaatccaaactaaatatataaaaaagagtactgtagagaatacattctttcagattttctgcaatgtacaaagaattgtgtctaattgttcaccataacattgaccttcaccatttgatggatgagcatccggatctttcgtatctatatgactatgtcttccgaggatgatactgagatgtcctaaatcgtctagattacttttgccatcgacaaatatagttttgctgctacttagagagaccggcaaatctcttcccaaactcttctcgaattgtaatgcatagataagttcttttaattcaactacacttgccaatgccttaaaaagaagatatacaaaatacgttcaaggtaatagagctcagtgtatcaccatcaagcttcagattgattgatactataatagaatactgattcaaatcaattcaacaatcaacctgcatataagttcaataaagagaattgaaaagcataatctcatacaaaactctgaagattccatcaaaagattcaaaacaagttgtgcaaatctaatccagataattcaacgcatatatatacaaaagcaatagctgattaaggtcgacaaatgtaattgtaattcgagtaaagcctgcgattaccaatagccgccatagaagcttcaagcagctcctttcaaagctttcttcagctcctcagctacattgccctcttccttgcttttcttcccaccgtaatcagacgttgtcgttctctcgctgctccaccgatcagctctcgatctcccgttgttgttgttgttgttgttgttgttgttgttgttgttcctctcggattcgcgatacttcgagtgtgatccgtaatcaattgtcgccggcgagtatggacggacgtttgatattacttcccggagatcttcaacggctctctttaactgcttgttctccgttcgaagctcctctatcacctccgccacgtcaccacttgttgtgaactgagccggacccgaaactttacccggatcaccagtggatttggtcactttagcatctgcgccgtccacgtgttcgattcctattttattcatcaccaaaaaagggaatctcctcaacgaaatagcagccgttggatcgaaatcgcgtctgatctccgtaggaaccctaacgccccaccggaaattcaaaacggcgcgtcctctcacaggcagagacgtcctcgccgcaacctcaacgccagataacaatccagcgatatctccagcagaagttgacggcagaaccgtgacttttctaaatcctccgccgcatccattgaccgctggagtatccaccacctcaatcgaagaatcatcttcggaaacagatccattcatcgatttgatcaaattcctctcaaatccagacgaagaatgagactttttgatagagaaatcgccgaattgaggtttgaagtggagcataaagctagggtttccttgacctaggagattgaattcagcgctcatgagcatagagcttgaaatcggagaaccgaacgatcccgatccggttttgacgattagagagaaaggattccacgaatcgtttggacggtaagcgactttgagagaagggccagattcgaagaaagtggagagattgagactgagctccttggattctccggcgacgattccagattgaaagggtaaacctaagatgcttaaaggaactttagccctaaaaagaggcttttgctcttcacgaaacttcatcgatgccttcatcttcttctacgcccaaaatcaataatcgaattcagcaagtagcttacggagagtaccagtggtcgagtagaaggatttgtatgagttttaaactaaatttaaaggaaaatttccacttttttcttaagaactaggaattgtgtaaagattttggttggacatgaggataaaggctccagaagtgtttttccctaatttaccctcgtgtaataagaaaaataaccgataatcaagactagtctgtggtgtaattatggggaagttccaaggcgaaaagataagatggttaatgcttaaaatgaaaggtggacaaatgcctggttgtttgtttatcccttctgcttctgtctgtttttttcttctctgtacacacataaagcccgtaaatatatataagcttagaaagcccatttatattaaagaggcctttacgctgggctttcgttttgtttgtgcgcgatttagggttttttttgtttgctcacactttttttttttttcttggttatctaatttttttaatcaacgatacgatttatccatcttcttaaagaggttaaacaatagcaaaagagtgagaattgtgagaagttagtatttagtggtggctgatttacaatctgcgtggatttatttgtccatttttagtcttttgttgatacatgtatttactgaaacgggagactccagtacattaatccttgtgaattcttactgtaattttcgatcaaaactaaataaaataaacaaattaagcactgtgttatgcagaagaacaagggtttaacccgcggtttaccgcgggtctcggttttatatagttttaattaagtatttgattatattttatactgtaaatttataaaaaaaaaaaatcttttattttaaacttctataaataatgtttaggatttttattggttggttgttatttagtgattagaataatatgttttaatatgtttaaatatgtttatgtaatttaaatataagtaaagttgtaacaaaaatgtaaaatagtaaaagtggtgtaattctttttgtgattataagtgttttttgaaatatttttttgtgattataattctttttgagtggaatatgctcatatatagatatcaaaatgaagtaaaaataccaatattgttgaacggttaagattgtctactttggatgctaaacgcgattaggtatttgaatccgtgattaagagaccattactcctaacccacccaaaattaaaaatgtagatcctataagctttaataaattgagttaaccaaattacccttaatgcttatgtacaaaatgcaaaattaaaattgaaattgagaccaaatttatctatttttcaatttgtatttttcttttaataataaagggattggaatcttcatcaaatatgaaatagcttatagttttatagcataatttacaaccagacgactttgcaattaatatcatcattcacgatatcaaacacaaaaaaaaaaaaatcatattaaatttgttgaaaaataatgtttgtgtgggggtctttccatattccagctaagctagagatgtacaagaagaagttgtgaaactgggaaccacgtcaaacacatacggagatcgaggaccacaatctatacggcttaggtatggccacgtgtttaacatccagttgtttagttacccgcatgtgggccgaatctagaagagagcaaaagactcgtgtgtgttcgactctgagtctctgacgcactcatttgtacaaaaagctctcagactacaaaaccaaatcctttccgttgagtttcaagctcactctctctctctccatctgtctcccttttctgttacagccgttagatctctttcatatctctactcttgatccgacggccattatctattgtatcatatcttgtagtgcatgattaaaatgattcaccattgtgtctatttccgtgtggatctcagcaacatatagagttggcaaaaatgttctgaggcaaagttagattgtgcaacaaaaaactagtggtttatttaaggtttagtactatttttaacaaggaggttcgacacacgtatatgttctctaattaaggttttgtttgttcacgtattttaagtagttagcatagatatctatagctaggatactagttggctttattaacttatttttcttgcaaagttgtcatagagatattaataatactatactatactatatgtgtagctatgcattttggtatattttttttcttattcgtggttgatcactaatatttatgaggagcttgctgtatatagaatttaattattaatgtttagataatgtatatatgtgttggatgatcaaaaaaagaaagtgttaattattaaatatttttctgtgttggtattttgataaagagagaaaaaaaaaagggtgaagaatagacgtcaggaagtgaaactgcctcgtgcattaagagatagaggacgtgatcagacgactaaaggtaaaaaagctaagtgagagtcaccgcagagtcatgccatctccatgtcttcacattctacttttcctttatattatctctatttgctgattaacttgtttcttttgttcctttagttacttttatccaaaaaaaactttagttgattgcttccttaatgcaaactcagtgaataattaagatatacatgtgtaacaaattcacaatgacagtattctgcatgtatgagtatatgtttttggctgatacaattacaccaaacatgaatctgatgtaaattagaagtgcagacaatgatatgcaaaaattgacctctattatcaactaaacgttataatataaacgaatattgttttgttgcaaatatataagaccaatcatataagtttgttgagtttgtgtgtcatggtgccaagtttgtgaaatcctacttatctatgccacttgcatttatctatacacaagaacgcatatatattaatataggctcagaacagaaaaattccaatattacgttaaatattaaagaaaatacaacatgaatattaatttggtttgtgggaggaggggaccagtgtgcttcttgttcctctattccatgtcttaagaagctagcatactaacacatctttctcataatacaatagttacatgtaattagtttattccaactagtttaaaaaatgaaaaattaatttagtccaactagttagtttctccaataaatgtatatatcaacaagaccagagatccatttgtttaaaatatagttttcttactattaattacatgatggctataaatttataattttggatcgtgttttgagtacaattatcaaatagataaacaaagtgaccattaaattatttgcctatatctagttcatatatattaagtactccccatagcactatttaaaaggatataattaagttgaacagaaaaagtttaaattattttgttctttcatacttatcatttcctctccttctatataaccttcaaatatcttcacttacaatcaaattcaccaactctctctagccctttctcttttctctctctctctatatattgctaaacaaaaccctacttattctaaaaatggaagccacgatcttcgagaaaagaagaagctcgttatcaagcatagcggtgcacaaacagtcatactcgataaccaaatcaaagccaaagatccgtataattcacatatttgctccggagatcatcaagaccgacgttgccaacttccgtgagctcgtccaaagcctcaccggcaaaccagacgaccagagaacttccaaggcaaaacctagaagagatatgcatcgtcttcatcgtcaagtccaagacatgatcaacacggagaaactaagagaacccgagcattgtgatcaagagttctgcttaaacgcagaagagctctcgatgacttggaacggtaataatggcgctggtgaaagctctggagggttcttgaatggtttgggagatttcgaagggtttattcaagaacttggtgaatttccttatttgcccttgtcctccattgatgcttctgcttcttctaactcctcttcttcctctcatttacatggtggatcagttttctcagatcaattcgcttaactcggtctctcaaaggatgtgtaacctttttcatcttttattttgtttactaggtttttgtggaaatgaatttttaatttattacttttttttttgtttgtttagtatgaggctaattgatttaatgaaattagctgagactccttttatttctcccttaaggtctttatgatttgtccattgtcttcaaaatgtaatgtacactgataaatgttgtgtctagcttttgctttcttggacgtcctctaagcatttacaatgttaaatgtttcatatatatcagagtgaaaacattcactaataaaatcaacagaggcaaattttggcaatcgaatgagacaaaagacgaagtagatttaagaaaagaggtctcagtgtgtccggagatatactatagtgaggtcggtaagttgtatacactttttgttcttacatttacagagagaatcagagtaacaagagaacctgtttttaactgttgtattcaagattctctacaacactcgatgaagacatcggagacgatgtttccaccctcgttagaacttcaggcactcctgcggtatctcttacaatctacataacaacaaccaaaagactcgttttataattttctgtaagctccaacttgtatcatcataacatttcaggaacttacaagaatctcgtcgtctagataagatatcatgaagaatctttggtaagttccacctgaaagtcaataacaacaacactacttggttacaatgttacatgtgaggagtggaaaatgttaaaatgatggttatggctttaccaagggggattcttagaccattggctagagtatctttgataggttcaggaagctgttgcaacgtggtagtagcttgacccaataaacctcttagttggtcaggtactgcttcttcaataaccgttggcgactcgagcaatccctctaaatactcttctttcatccttaaaggcccttctattgtcaatttcgatgacagggtgattttgttttctatctgcatcattttcaacagaaacaacaaagaaactctaatttgagtctgcttataaatccataattctcatccttggaaaaagtaaatttaccgagtttaggagtttgatgtttgctgttgcctttgtgttattatctttaatgaatatttccatattggatagactcaccaatgtcgaagggaacctcctgccacaataccaaacagatgtaggaatgcttaaaaactctctagatataaaacgaatgtttatttgattatcgatgagcaagaacactgactcgaacataacccgaacagcaagagaaccaggagtgttgactccaaaccactcaaaactccatctaccttcaagataaggagacctgacaaagctagctattaggaagcatcaaataacaccttaaagcttaaaactttgaagctcaaaatcgagcaacatacgtggttggtctaggagttggattaagccgctcaagattcgttatcctttcattgacatcaatcttttgcatatcagtgatcttccctgtaactagagcctcaaatcctccagcatcattgaactgtaatctcaaatggtttcagaactccaacagagagcaatcaaattattcactaagcaatctaatgatgatttccaaaaccagatactaaattcaacctaatttctaaccaatcacagttgaaagtttcaatttttaagaatttttcgaagacttacggcgagaataagcgattccttagcagagagacgctccatttctctggcgtaaactgaaggaatcccttgaaccgagtcttgaaccatagctctgcatatcattctccggtaacaactcttcttctccgactgaaaattgagagaaacccttgacagtggaggagaagacgacggtggtgatacagaggatgagaagctcaatcgaaccgcagaggtcccagaaaccgaaccatgttggatcaatgccattgaataagggggaaaaggtcaaagattggctttttattagtctgaggaatgagtaggtagaagaagacgagagcagcagcagcagaagaacccaactaaatttatcagttttaatttaaattctgaatttgcataaataaagataataatatctgaaaaaaaaatcttgtaacaaaataatattagaacatacaataaaggtctaataaaatttttgggaaatggttttaaatgtaaaatgcaacaaaatattaattttttactagaatactaaaagaacattcatgatataaaacaggcaaacaactatacgaaatttacctccacaatatgattttgtgcatttatttccctatgacactcaaaagatattagatccaatagaaaacaataaatatgaatgaagaacatttagatttcacataaagaaagtctaaactctaaactatgaagaaggagaagtagagaaaaggaaaaaataatgttggcattattagtggttaaacataatcgtaattaatgatactccgcgtgcttcatatcgaattaatagaggttttaacatatatttatttccattagctcgttttcttggtccaaaaaaggaaagactcgagcttattaaaggactttagacattgcagtgaatcttctttttccttgtctcatcacttggaatccgagtatattaggtgagacttgtttatgtgaaaccctaattaagttaatattttcttcaagttttctcggtatatatagagattaaactcaagatcggtttcctgtttttgtaggttattatatattttctctgaagaatatgatgaagtcttgttcctcaccgaagatgatgatgatgaaatccgtgaccgcttgtctaattttaacacttttgatcatgtccgtcgccgcaaaaggcggtggtggtggcggtcatggtggtggaggtcacggtcgtggtggtcacggtcgtggcggtggtggtatttttttctttggcggtggctctcatcatcgcaacagcgcttccgttgacggttcaaacatgggtctaacggtgacatgcttggtgtcttctcttctgttcatgttgttccaaagattctgaaccttttagaatgtgaagaacttatcatatttctagctttgtttttaatagcttttcataagataaatatagacactttcgagttcttcttctttttttgcgtgtaagtcacgacaccaatcataaccaaattttttatattagcttgtgttccgatgatattttggatctcgtgttcgttttatttgaaacaagagtttgcttcaatattgtgcacgtctaacacaccgtgtaatataattagtggaggaatctcgaaacaggaaggtgaaaaaggctagtcaagcttgacttatgtaagttcatcacagtaacagtttcttctcctctttacatggcgtagaaactttcttttgtgtgaactatcgactgtccacatttactgtaattatctttcactattcacatccattcacatatacatcacaatgatcacatcatcatccctactcaacattaggttcacaaatcacaattacattcgactacacaccaaacaaaattacagctctatgtattattggcttaaaaaactctctacgtaatttttgtttgttttggttttaatgttaagctcgaaaaagtctctacttaattcaaagactttcttaaattttaacaatgaacttaacgatcccttccgatacaagcaagcaaacatcaatcactctctcgaatggtgttttactcgtcgtcatacaaaaacagcgaaatatcgcattgtcaaagttaagagggcttgcttttgtgacaccaaaaacaaaaaacaaaaagcgatgggtaagtacgttgggctttaaagataatgttgggctttattattgaggctcgaattgggctttcttctctgttttgcatttgttgcgttcgacctctgcttgaaatgctggtttggcaacattccggttagatctcttcggccgccggagatgatggccgccataagagcagcgattctgaagccgcaagactattattctcacctcaaaacagctcttttccattcgactcctatcttacaacgcaaacatcaatctgtcagtctctctcttttatgtttcctcttctgcaaattctcaatcgatgcttggattgtgcctctctttgaattgtgttggatcaatatcaccttattctcagagtttgatcttgtggataagtctcgttttgatttgacatcatcttctgacagaattcaaaagctcgaagcaaaaggtttggaagaaagaaggcaaagcaagatttgcgtcgtaatgtgaatgcttttgcacaacacttatttggggtaatgtcaagtctctgtttttgttttgtcgtaatgaaacatttcttttgtcaatgtaagaactaaaaagctttcaattttgatgcaatttttgtaatttggtttcccagatatggagtgatgggtttgattactctggtaagcacacctcatggtttgagaaacagtactctagggtttccaaaaggaatcggaatggtaaaacacacatccctcaacatttggataaaagtaagtaagacaactactcttctttgcctctgctttctcctcaatggttgaactatagttagtgtaactgcttctacaatgaaggaaggtttatagactgtgtagctaccaatgctagtgatatagtttatgttaaggaaaagtcaattaagtgaaatttaaaaggtgttgtttgttggtttcagtatttgcatgtagatattaatctccaacaatgctttcatttatgtaggatgttttgattttagcgaagttgatgagggataccaaattgagtactttttaaagactgcgttgggtggatcccgaggtttctcttggtcaaacactcgtgaggggggaactcgctcagggaggtactctaacaactttagaaaatcttggggttcaagatatcgcttagatgaagaagaagaagaagaagaagaagaatacgagtattcttcaacaggagtgagcgacacagaaccaaatcaggagtctcatagacagacacttggtttaagttcatcaggtcccttaaaccttgaagatgtcaaaattgcgtaagtaaaactaggcacttcatctcatcagagagaagctatatttacatagatcatgttttattaatctccataactcttgcttgccaactttgttactcagataccgagcttgtgcattaaaatggcatccagatcgtcaccacacctctaccaaggtaactaatacaagcttcctcctctatatttaccactttattgtgtttttcgcaactgaatgcatccctgtacgtgtttcttgacactaactacaaattggtatgacgaaacacagaatgaagctgaggaaaaattcaagctctgcactgtggcatatcaatctttatgcgaaaagctagccatgaactaataggatagctcagagagattgcaagatcttttctctgaccacagcgatgcacattgtttattgactctgtgtttggtaccgactgctattagtgttagactcggaatgaatcacatttaaacctggcttttctccagttttcttgtgttgacaaatgtagaaacttccttttatgtaaagttgtaaacaaatggatagagagggaaaaaaatggagagaaagagaaaggaaaaaataaatccatttatatacattcatttcttgtataaatgttcatttgattttatttgcttttttttagcttgtgcagtctaatatgtcaaatgtcaaactctgcatatatctttttttaattccattaaatcatttaaaaatatcaatattacttttactaatgttgtttttgataatatatactccaattatcaaaaatatatatattttacactttatagatctctgatgccaaagtacacaaacttataaattttaataatttgtttttacaaaatgataatgataattaaactatttctatattttaagcacatgtatttatacttgatcctttttttcaaaagataatcttaaatgaccttttaatatttttgttattgattgaggttttaacatatagtagtatttattttgattaactcttaggaaaggaaaaagagtcgagctaataaggactaacttcagaaaacaactccttatcgcgtacttgtttatgcaaaaccttattaagttgctattttttttttgaatatttcaccgttacagcttaaaatctagagcgttttcctgtttttttttttacaagtttattatttaccctgaagaagttgatcaagtcttgctcctcaacgaagatgatgacggtaaaatctgtgacatcgagtctaatcttaatccttctgataacttacgtggccgcaaaaggtggtggtattcgcggtggccgttggtttggtggtagagttccaagccacggcggttctggtcatcgtaatagcggtttggttgacggatcaaatatgggtttaacgatgacgtgtgtgttgtcttcttgtgttttgcttatgttgttcaaaagattctgaactcttcagaaaataaagaactggctttttaattaggggcttttcatatgatatactcttttttgttaaaagtttttaatatgatatacataacaatatattgatttttttcattttttgcaaaaatttgtcattcctaattggggacatctgattagaaaaatatgtagtacttatttacgtgaacaacaacgacatcaacattaaaaacggaacaaatacttttcaattaattatcttttatttggggatacattatgtatttgatgtcaacttttgtatttagaatctaaaataatacttattttgaaacataaaaggacattatctatttatctgttttaagaatctcgagagttcaaaagtttttacctttaaatatttttcagccatttgcttatttaaaaatattcgatcaaattgaacaagaaagttaaaatttatagagataaacacaagaacgaatgaaacttcaaaagtttatctaaaactaaacaatgagaataaatggaaaaacgaagaagaaaaaggaaaatctccattattattggctaaaaattattatttatataatcgattattttatttttctagggaaaaaaggaagagtagtcagtaataagggactaaacctagacaaaataggaattggagaaagtacttttccttatgcaaaaccccaacttgttattttgtcgaagtttttctctgttacaaatcaaaaccacaagcgtcacttgtttgttttggttttttttataggtttatatttctctttcgataagatgatgaagtcttattcctcaccaaagatgatggtgatgctaaaattcctgactgccggtctaatcttaaccctttcgataacttctgttgcgggccttgcggcaaaaggtggtggtggtggcagcagaggtggtggtcgcggtcggggtggtggtgtttatgcgttcggcagacactctaatcatcatcttcatcatcatcatcatcatcatcatcatcatcatcataatagcactgccactaacgtattaattttgcttttatcattgcttggtttctttatatttgtttgcattgtgatatttgtgtatcgtcgttggttgtccaaagaacctgaacctttgagaacgtgatccatatcagaacgatggggtttttattttatttcgtaagatagacattttttcagatattgtaattttgcgtgttaagtgatgctaccaaatactatttgatcaaacatccaattcggcaaaaaaaaacaacaacgaaatactagttttgtgtttggatttgggaggtattttggatcttggtttgcaagagcttcacagaaaagtttgtctataatgatagtctcaagtctcaatccaattacttccatatctctcaagattttaatgtaaaaccaaagttttcggaaatactgatgatgtacattaccttcaataatattacaatctagatagtaataatacgatacatatatgaatgtcaatatctccgaattttcttggttttagaacaaagacatattataggtttttaaatcagggcccaatggatccactggcccgtttaatttatggagtcagactcgagagtcgacactaccccaattgcccaaaagactcacgtaactgtagtttaagttgagtttctattttctaatatatatatttttctcttatataaattataacttggaagtttttataagtcgaatttataaatcacctatacttgagtccttctgtgaatttataagtagttactaatgtgttaaattctcttcgttcatgcttgtcaatcgattgcaacgttgtgtgtgctcaatgattcgtatcggttcaattgtggacttttcctaaataatttatatggatcaatatgaccatattgtaaaatttcttatccatttataaaatgtataactttctattaaaacgaaataatacaaaaatagtttagcatctaaacaagggttatcacaccaaaaacgaaagacaagtaatgagttttggtatacatttatagataaccatttggtatctttcaacattctcgtccttcttatcattataatcatctttttaatcaaaaaaggtttgcacataacataagcttttttctttctctcttaatcagaaaacaatcttgtctcacaaaaatataattaatgattctaaatttccctaaccgtccgatcacaaaagatcgtgatcatcgcgtggaaactttagaccaatcttttccctaaaccggaccgtaccagattccttctctctctctctgcttagagagttttaggttcgttttcccacttaagccaaattggacaagatttggacgtttctgtatctctcttaaagctaaaaaaaagggcgaatttttccatggcgttgtcggagtttcagctagctctgagcttggtggtcttgttcttctagctgatttgatcgaaaccccatgttcttatgattttacacgacctaatccaaaactccaggtccttgattgattcttctctctctccagctccagattcttctgatttcttttgttatcatttgtttttgtaagatttgtatccgtttttgggttttgcttagctgattcttgctggatcgagagttgaataactctgcttttcttcaatctggttttttttttttgtttcatagaggagaaaggttgtggatttctcaggtggggatttgagaattagggttttctgattgggggttttcttattgatgttaccttcaccaaattgttgtcggagatctagatttggttcagttatggaataatggctcgtctcttgccatctctattcgtaattagcatcttcttcttcatccaaagactcctcctttcttcgttaatccatcgccagctattgaatctgaagcaaatctgagaatctaccgaactcacgcacctgtatattgcttacacggtagatatctcttctttttgtttccgtttttgttgaatcaactcttttttctattggaaagtttgatattttgcttctccatttgttaattcacctgttcattttctttttggtgcacgatctcttggctttcagagtttgtagttagtcgtagttgtgcaatcatagtaagtggtctcatcatatgttgttgcagagagaatatatatactttgtgttcttcttcttaatgtttttgactttgtgtatgctttttctctggtggatataggtactaaactcgtacgaatagtttctttttcacattgggtttcttgtatctctgcaaagaaagctagatatatggattgttttatatgggaactgcatatgtttattggctaattgcttctctttccctgaagatacagagcacacggagacggagtacatattgttcagcgcaagtgaaagcaagagcctttttgtctattgatgggtgaggagttagctgacacaatgaacctggatttgaatcttgggcctggtcctgagtctgatctccaacctgcaccaaacgagactgtgaatttggctgattggactaatgacccgcctgagagatcttctgaagctgtgacaaggatcaggactcggcataggacacggttcagacagcttaatctcccgatcccggttctatctgaaacccataccatggctatagagctcaaccagttgatgggaaattctgtaaatagagctgctatgcagactggtgagggtagtgaaagaggcaatgaggatttgaaaatgtgtgagaatggcgatggagcccttggggacggtgtattggataagaaagcggatgtcgagaaaagcagtggcagcgacggtaactttttcgattgtaatatatgtttggatttgtcgaaggagccggttctcacctgttgtggtcatctttactgttggccttgtctgtaccaatggttacaaatttcggatgcaaaggaatgtcctgtttgtaaaggagaggtgacctccaaaaccgtgacaccgatctatggacgtggaaaccacaagagagaaattgaagagagtttagatactaaggtccccatgagaccacacgcgagacgcattgagagcttgaggaatacaattcaaaggtcgccttttacaataccaatggaagaaatgattagacgtatacagaataggtttgacagggattcaaccccagtccctgattttagtaaccgagaggcatcagaaagagtcaacgatcgagccaattcgatccttaaccggttgatgacatctaggggagttagatcagagcagaaccaggctagtgctgcagcagcagccattgtcgcagcatcagaggatattgatctaaatccaaacattgctcctgatcttgaaggagaaagcaacacgagattccatcctctcttgatcaggagacagttacagtcgcaccgagttgcaaggatctcgactttcacttctgcgttgagttcagctgagaggcttgtggatgcgtattttaggactcatccgttggggaggaaccaccaagagcaaaaccatcatgctcctgttgtggttgatgatagagactcattctcaagcattgcagctgttataaactctgagagtcaagtggatactgcagttgagatcgattctatggctctttcgacatcgtcctcgaggagaaggaatgagaatggttcgagggtttctgatgtagacagtgcagattctcgtccgcctaggagaaggagatttacttgagaaacataaataagaaaagctttcaacctggaagctgacgatgatgatgattaagaagaagataagaagaagattgtgtaactttatttttcttgtgttgctttgttgtaatttgtttttgtatttttctcgatagggatggttttttttaatcgaaaattttctttcatcttttttttcttctgacggtaaaatatcataaacctttgaatccaatatggaatgtgttcttgataactattcttataaaacaacaaacttgaaaattttaatcgatttccaaatgataattagatagcttgaaattttgttggatttgaaaatcagtaagaaaatgtagaataaactattaacctttttaaaacaaaacttttaggcaaaatgctaattttattattaagtaacatggtgtgttttttcaactttgtagactaaagcaagttagtatataaatcagttatgaagcaacgtaacaataagacactttggccgagtggttaaggcgtttgcctgctaagtaaatggggtttccccgcgagagttcgaatctctcaggtgtcgtattatttttattttcttttccttgtcccctaacttttttttttgacagatttgtttagaaacgatgattatatggtcgtagaaaaatccaatttttttttgagagtacatgtcacatgcgcacagcgacatccgacacgtctattattttctgttgaatcatctcacttcatatggttttcttcaacaattatttcacttctgattacaacaaaaaaacttatttttatactatcatatgatattttcttggcaatataaaaaaaaaaaacaccgcaaaaatacattcacacgaggggagacaaaaaataaataagaacccccacaaaaacagacatcttccaccattttcaggctttcatcatttattaaattataaagtttcttggattcttgttaacttaaatataagctgccaaatatatatcagcttacacttataatggtcctgttttaattgaatttaaccttaaatctcattggaaagtgattgacaaaattcaaaaaaattatgaggaaaaatgaaaatttgaaaagtgaaaataaaataaaaataaaaactcaaatgatgtgtgcgggaaacgagcgacgtcgcgttattcgatgcacgaactcgagccaataagatgtttttaaatctaaaaatggctattagattcgtcattacttttgtatttttccacaatttaaattgacttttgccggagatgtaacttttaaactattttactacttctttttgtttttactcataaagatcacaaagattcactcacaagcgtatgtatatctgaagcaattaaaaatgagaaaatatttgtccttttacagtttttgtttttcttctctgttacaaaaatgtaattacatctgaaaacaatactagaaaaaagaaagtaatcgagcgttgtaacgcaccataatggagaaaatagtaatacaattatgaagatagtacaaaatctcagatgaaaatatagtaaataattgtaattaaatgagataaaatcaatttctaaaaaaaaagtaaaaccaccttcgtgaattgtgattcggtgtttttaaaaagtggggaataaagacaaaacagagaccaccaccattaatggctttcttcaccgatacgaacaagacaggacacaacaaactcaatcccagcctcctcctcctccgtcttctcccttattcccttttcgtttaatcccccaattttttcaattaatccctccttttctcctcttaatctgaatccgaagcaacgcataatccataacaaagtctggaaaatttcttccgggtaagagaaaacttcttctctttcttttcaatttggggttttttattttgaaatcgggaacaaaagatccagaattacctaattccgaaatttattatcgggttggattatcgtgtgacgacgaatctagcttgctttttggggggggaaatataattctcggaaggtcaatttttttttttgcttcattttgttgtctttgaatcttttggtttatgaatggattgttttgaaattgtttcataggtcaaagagacaaagatattgttgagatttatgatattgggatttgtatttttgaacaccgtttctctatagatttctgctttaacctgatccttttaattgcaaaattgtgaaactttgcttgcacgatctttgtttagctttcacaggttagatgcgttggttcttgttctctagttagatctattttcatgtttatctctgtttagttagattgaaaagagaataggtttttgtttgttctcttggaatttttctcttttgatgtttgatagtcctgtgattgattactgtttaactgttgaagtcattggaatgtgcaaaggtctagctttgttcatagctttaggcctattgctttgtttacctatctgaaagtgcatttattgttttgcttcaaatgtttgattattttattttattctttgttgcttaagaagctataaaaagtaaaagacttgatcagctgaaccaagtatctgccccttaatctacttttttccttctcaatatatcaactatatgtattagccttctcaatataagcttgtattgctaatgattccttttttcctgcaggataataaagagatccattaggagtaaattatctgacaagagaatacaaagggcaatttcattttagttgaattagggatttgggctcgtcatggctcctggaggcagtgctttgaaagaagtcatggaatctaattcaacgggaatggattacgaggttaaaacggcaaaagtggaagttaataataacaaacctacaaagccagggagtgcagggattggaaaatatgggatccattcgaacaatggtgtttacgagcttcttgaatgtcccgtctgtacaaatttaatgtaccctccaattcatcaggtcagtagtatatgagcttgaacagatttgtaattgactaattgcaatgtttcatgttctaaatgttatttaattctacagtgtccgaatggccacacattatgttcaaactgcaaactgagagtgcagaacacatgccctacatgtcgctacgagcttggtaacataagatgcttagctcttgagaaagttgcagagtctttggaagttccatgccggtaccaaaatttggggtgtcatgacattttcccttactacagcaagcttaagcacgagcagcattgcaggtttaggccttacacttgcccttatgctggttctgagtgttcggttacaggtgatatccctacacttgtcgttcatctcaaagatgatcataaagtcgatatgcatgacggatgcaccttcaaccaccgttatgtaaagtcaaatccacatgaggtcgaaaatgctacatggatgcttacggtaaaactttctttcgatatgttttcttctttttatcaaaggtttctaatttaaagtctgattcaggttatttcttcagatgaaatttttatgcaggttgtgattttatatcatcatatgactaagcttttacattcaccttctttcgctgttatcctcaaccatgaaatattcctggctttagctcttttctacaaaatacagattggattctttagaaggaactataggaatctctggctctgctcttttatgctatttttggatttctattttgcctattaaattttgaccttgaacaatccggtgccaaactcccttactagctgctattccggttcccgctttgctcttctttgttagtccaattttacggtctccttaagtacctaccatagggtctcttagtcccactttaatcctcacacttaaacttgaatctcagttactaaaattttgtttccaggtgttcaactgttttgggagacagttctgtttacacttcgaggcgttccagctgggaatggctccagtgtacatggcattccttcgttttatgggagatgagaacgaggcgaagaagttcagttacagcttggaagtaggagctcatggacggaaattaacatggcaagggatccctagaagcatccgtgacagtcacaggaaagtccgggacagtcaagacggactcatcatcccaaggaacctcgcactctacttctctggaggtgataggcaagaactcaagttgagagtgactggacgaatctggaaagaggagtaaacgaaaaacgaaaaacgaagaaaagaaggaatcgattgaaaaatgttgtacataagaagaagcctcgtggaagagctaatgatcatatggaagatttgaagtttgttgtctggttttagtgtggtataatggattcttctccaatgggaatgaagatgagatgatgataatgacaaatcttctatgatgaatcagtttggaggagccattgttactattttgtggctgcaagaactatattatctctgtattttttgttttttttgttgggatttcttttgtggtttcagagaatgtaggaaaaagtaagacatggttttggctatgttcttgttgtaaaaccaagttcaaaacagattggtgcactttttatcttttcacaatggtgattttcattcagtttagacttgatatagcaagctcgatgtttaggcattacagcatgatgacaacacgacaacaccttacccacatagacacacttttactcatttgaggaaaggtaactaacaaatatgaaaaccaagcaaaattttctatatctacaacgtaaatatcttttccttttgtttttcgtttttgttgaatcaactcttttttctattgcaaagtttgatattttgattctccatttgttattcacctgttcattctctttttggtgcacgatctcttggctctcagagtttgtagttagtcgtagttgtgcaatcatagtaagtggtctcatcatatcttgttgcagagagaatttagactttgtgttcttcttcttaatgtttttgactttgtgtatgattttgtctggtgtatatatagttactaaaactcgtacgaatagtttctttttcacattgtgtttcttgtatgtcgccatacaaagctagatatctctttccctgcagaataatacagagcacacggagacggagtacatattgttcagcgcaagtgaaacctggatttgaacctgatacataaatttgttatcgtttggtcattttaaccgctccctctaatatttacctcctttttataagttacacatcttttacatatctctctctctctctctctctctctctctctctctctctttctttctagaatatattgacgcagccgcgaatctcatcgtcatcgtcatcgaccaagaggaaccctgatttgcggcttttcttcctttcaatctcaattcgattcgttttctttctgttgaaggatctgaccatccagattttcccgggaaatttcataatcagactcttctctttttatcttcattttatttccagaaatcccgattcatcgcgatcgattgttgattgctgtatttctccgattggatttggtgtttttgtagtccgatttcacggacttgaatccgataggattgttttgtttgttgttgataatgaaaacattggttgatgaatacaagagactgtaaatgatgccgggtttagcgcagaggaataatgaccaatactcttttggcttctggtcaaaggaaatcgatggtgtcagctataatcagctccaaaaggtaccttatcccacattggttctcttgcctctgattcattctttaattgctgtttagagatgtttttgctttcattgtatcaatccaagttctagttcagatcttattcacatatatgtagctaaatgacgatgaatcattaactcaaagcacattgttctgaacttgtgtgcagttctggagtgagctgtcaccgaaagctaggcaggaactccttaagattgacaaacagactttgtttgagcaagctcgtaagaacatgtattgttccagatgcaatggtctgcttctcgaaggtttcttgcagattgttatgcatgggaagtccttgcatccggagggatcattagggaattctccttgcaacaaatcagggggatccaaatatcaatatgactgtaacgcagttgttagtaacggatgtgcggatgagatgcaagatccgtctgttcatccgtggggaggtctcaccacaacacgtgatgggtcgcttacgcttcttgattgctatttgtatgcaaagtctctcaaaggacttcaaaatgtaagttcaatgcaaggtttacctatttgcaatcaactccagttcaactagttaatctattggttctagcaggtgtttgacagtgcccctgctcgagaaagggaacgtgagttgctatatcctgatgcttgtggtggtggaggccggggatggataagtcaaggaatcgctagctttggtagagggcatggaacaagagaaacgtgtgctctacatactgcaaggctttcttgtgatacactggtggatttctggtccgcactcagtgaggatactcgacaatctcttttgaggatgaaagaagaggattttatggagagactgaggtacaggtatgtcgctaattgatttaattccttgttgttcaatcacaaattgagtcggaaagtttttggacatgatctgggtcatgggtaacaggatatgttaccactcaagttatcacattttgaattgcaagatgaataggcatttcgttgtctggactattcaagatgttcttaccaagtcatgcaatacaagactcttctttgtctggtcatgtcgagacttttttcgctcggcttaataacaaatggatctttcaaattacagattcgacagcaagagattttgtagagactgcagacgaaacgttattcgtgagttcaaagagcttaaggaactgaaacgaatgcggagagaacctcggtgtaccacatggttttgtgttgccaatacaacattccaatatgaggtgatttatctatgttaaccttttcatctttgtgggttcctatagtctagcgttatgcttttcgaaaagtatattactatttctcttatgaggactaattgcgagatgggactacaaatataattgcaatattaaaggtatccattgattcggtgaaagcagactggcgggaaactttttctgagaatgctggaaagtaccatcactttgagtgggcaattggatccggagaaggaaaatgtgatatcctcaagtttgaaaatgttggcatgaatgggagagttcaagtcaatggcctaaaccttcgtggtttaaattcatgctacattacccttagagcttataaattagatggccgctggtctgaagtatccgccaaagcccatgcattaaaaggtcaaaactgtgttcacggcaggctagtagttggggatggctttgtttcaatcaagagaggtgaaagcatccgaaggttttttgagcatgctgaagaggctgaggaagaagaggtagattccggattcatacactttttaacttaaacttctcaaatgtttcagactacatgaatattattctttccactttataaacgataccgctgtgcttcctatgttataaaaggatgaagacatgatggacaaagatgggaatgagctcgatggggaatgctctcgtccacaaaagcatgcaaaaagtccagaacttgctcgagagtttctattagatgctgcaacagttatttttaaagaacaggtttgttagatataggttccctcaaatcacattttattattgttattttgtgctatattcggtacttatttctgtcagttattgattatatcttaggttgaaaaagcattcagggagggaaccgctcggcaaaatgcacatagtatctttgtatgtcttacattgaaactattagaacaacatttacatgttgcctgcaaggaaattattaccttggagaaacaggtaggtatcctgtcttaaggttctgaaaacaatttgatcaagattatgtccaacagtttccgttgtcttcactccggcaggtgaaacttcttgaggaagaagagaaagaaaagcgtgaagaagaggagcggaaggagaagaaaagatccaaagagagggagaaaaaacttcgcaaaaaggagagattgaaggaaaaagacaaaggcaaggagaagaaaaaccctgaatgtagcgataaagacatgctgctgaattcatcaagggaagaagaagatcttccaaacctttatgatgagacgaacaataccataaacagcgaggagtcagaaattgaaacggggtatgcagatttgtctccacctggttctcctgatgttcaagaaagacagtgtttggatggttgcccttctccaagagcggaaaaccactactgtgacagacctgacagagatattaaagatcttgaagatgagaatgtgtactttacaaatgatcatcaaaaacctgttcaccagaacgcaagatattggaaagaagtgcagtctgataatgctttgaggtggtcagataaacgcagatattcagataatgcttcttttgtcagtaggtcagaggcaagataccgtaatgatagattagaagtgccttcaaggggattcaatgggtcaaacagacagttaagagtgaatgcttcaaagactggtggcctgaatggtatcaagtctcatgagaagtttcaatgttgcgacaacagaatcagtgagaggtttgacttcagttcttgcagttgcaaaccaagttgtgaatatcgggcaaaagtagaacctaaaaccgctggatccagaagcacgcgagaaccaaaaaccatatccaattcggactctgctcttgatgcctccaagccagtgttccaaggcaacaggtatactcaaccagactatactcgtgagttaagacttaaaagcaaggttggagttggtccaaatccttctactactagagattcactacattcaaaacaagtttgggagcccatggagccaaagaagtacccacgaagcaactcgtactctgaagtaacagttagatgttcaacatttaaggctgaagagatagaagacgctatcgttgctgagaattcatctgaccttttgtctcaatgtaaggttacagagaagttggataatatcaagcttaaagatgaaaacagcatggagtccggggaaacaaagaatgggtggcatttgaaagatcctatgatgagtagtacatcgagttcagacaattgctcgtcatgcctgagcgagggagagagcaatacggtttcgtcaaacaacggaaacactgaatcctcctccacatctgattctgaagacgccagtcagcaatctgaaggaagagagagtatagttgttggtacacagaacgatatcctcataccagatactactgggaagagtaaaattccggaaactcctatagtagtaactgggaacaacatggataataacagtaacaataatatggtacatggtcttgttgatgtgcaaccacaaggaggcatgttccctcatttgctaacccagaatctacagtatcccgttttccagactgcttcaccaatgggctacttccatcaagcaccaccagtctcttggcccacgggtccagccaatggattgattccattccctcaccctaatccttatctatacacaggtccgctcggatatagtatgaacggagatcccccgctgtgcttgcagtacggtagcccattgaatcatgcggcaactcccttcttcaaccctgggccagttccagtgttccatccattttccaaaaccaacaccgaggaccaagctcagaatcttgagccgccactggaactaaactgtttggctccaccggaaacacagaccgtaaatgaagacagcttctccttattccatttcagtggacctgtaggtctttccactggaagtaagtcgaagcctgctcattccaaagacgggattttgcgcgacgttgttggaaatatctatacgaaagcgaaagagagcaaagaggttgaagagtataacttatttgcaactggcaatggcctgaggttttcgttattctaaagtaacggttttgggtttgttgttgatttaaactgtggagtgtgaggtgttttatgactttgtatcatccgcaacgttatttattcgtctggaaaacaaaacaaaaaatctttcaattttaaaccttttttttttagctttttttttccttacaatttacacttttctctcacgttttggatttatactctctgttcattttacttatttttatattcttgcttcaatgttttatttgatgtagagcaatgttaagatctgcccgatttgaagtgttttttcactgaatatttggtattattcaatatattcaacatgagtcttttatgataaatgataatttctgtaatgttgaaatgatttacatgttagaataactgttcattattgaacttaatatttttagtttctcacaatttcatttgtgaattaaatgcgaaattctatgtaaaaggaaaattttctaaaaagattttataagaaaactaaaatgttctatattgtgtaaacgcaaattcaaacataattttcgttttacaaaaaaaactgatagcacagctaattaaaatgtcattttagatatgtaaatattttatgagttgaagaaaaagaaaggtaaacataacatattgattaaagcaaaattcaaaaaacaaaaaaactcatactgcaatgtatctagctgcagaggtcacatagtacaatatattaacgaagcaacaaaaacaagacaaacagttacacatacatatataatcttcataaatcgttggggattgtagaaaggacggaatgttcaggcttgtgatgacactcaaaatctagatgaacaaaagctctttccacctcaggaagttcttcaagctttatttgcaatgattcaccaatcgcatgagcttctttcaatggcaaatcctctggcagttctatatccacctgccaatcgcatagaacaataattcaacccaaagctatatagttagttaaataaatcttatttatatactgatcagcaaatattttgcgatgaattatacaatagtcaagtgtaagtaggaactgatttccaacttctatgatatatttaagtttgtaactatatgatttttaatttttgttttcttttaactatatgattgaaacattaattagtatgtgtgcacatatagacgaacctcgacaaaataaagaacaccgaaggtatatgcacggacggtatccacatgtttgatattatcgccgccttgtcgcatcactaggtatgtcaacttttgtagtacttctggaggagctgattgtccgatcaatgaaactatatgaaaataaatatgatgaatatcttgtgagtagatatgtcgaacaatacgacaacatcgaaatacaaatttacctgcattttccataacagtcccagaccaattgacaatagtgtagatggctaagagaatagcaccagttggatcgagccaccagtaaaaagcattagcaagaacggccgcaaccaatccaagaacatttgttaccacatcaaagtgatgatcctataacgaacatgcataatcagtcagtctccatttttgcatgaaattataagaatatatatgcacatatttacctttgcatatgcacggactatatggtttctcgagcttttgcagtagatccataagacgagtttaatagcggttgcgcttagcatgattgaatacaaccaaatcaattggacatgattcattttctctgaaggttcatttgaaatcaattgctcagctgccacaagcagcacttggaaccctacgcatttgtgtatgaatggttagtttatagcattacattttcattaaagcaattataatatatagtttagagttatataagaaaatcatgaaaaaggaatatatgtataccaagggtagccataacagcggcgaaaatgatgattccaacaggttgcaccctaagctttcctataggatatttgtagatatttacgttcttcatagacaaatgtgtgaaccaaagtattcctcccgccataaggtcaagcaatgagtcgagtgtagatgctgcaatcgcaatggatccactctttaccgtagcatatatctacacattgtagacatttgatatatagacgacgtcaccaaaacaatgttataaatgtttcaatagatcaagtcacaccttgagagcaagtaaaaagatgttagcccaatttgagatttgcatggcaagctcttgtgcagctctctcagctcgatcttcttcttcttctttttcatcgatggtatactcatctgatcgagctaagaaactttctacttcttcaaaggattttagtgttgccaattgtctttcgtagtactccttttcatcttcaaaaaaagaagaaaaagcatatttggtttagtagttgtgacagttattatctaaattattatgtaaaacatagataccttctttgaggcctgcagctttggagacatcaaggtgcaaagggttctcgggatcgatttttgatcgaagtttttgaggcaaatccgcgaagaaattcgatttcatagaagaaaccataccggttaactttggtttgtgatcaatagcctcatgatcgtttgacgaaagcaacggtgtttccggacaataattgacttccatttctggaaaattattaaacaaatcatcgtacaaaaaaaacatgaataaattaactactagaatttgaaggggaaacccccttagaataattaaataaactattaaatgaaaaaaagtatataccgatgatattcaggagaatttttatgcttgcaggtgatgaacaaagaaaaagataaaggattgtacacagagattggtttttatagatagattataagatattttatgtgcgttcattgaatttttgtggttatttattaaattattgtatggaataagaaaatagagatgatgatgatgatgatgatagagacagccctggtacttgcccacatgcaaaagcatcaacaaagcttgtctgatccatgccttagtcaggagcttcttgttccgtgacgattttatattttgggtacatgacaatcttattttcttatttagaaaacgacacgtgtagtttacagtgttgtaattgcaaagcataaatgatattcaacattcggaaccctaattttgaataatgctcacatcagcgcgtttcgacaagaaataacaattaaacttctacaaataactgaaaccttttttttttataaaaggcttaatttttttttttaataatcattagagaattgaaaccaaatttaaagataaggggtaatccaaacttaagtaacgtaattcaaatacgaaaaaaaaaaaaaaaaaaaatttgacaaatgagcgttgaaataggagagcccaaagaaaaattaagtatgtgaatattcattaagtcaacatgaaaaattgtatgataacagtaacacattgagatgtataaaagtttattatttaaatttattttgcagacatcacatataaacagacatacccacatatatataaccttttaactacaaatcacgtatcaaaatatcttattcatgttcgacagtacatataagtacctgacgtggacttctttggcttgaaaatatttcttcaatccaaaaggagtcgaaaatttgaagtcagaactgtgggttataaacttggtgaatcctttgaaaatcaacaaagaaaccaaaaaaaaacaaaaaaacagaaacagaaaaccccaacatgggtaaaatatgaagaaaattaattttttggagttaattctatttctattaaattatagaaaatattttccccaattttttacaaacgctctatgacttattgggacatttctttattttatagaataaaattctacagaaaaaaaatctttatagattcactttttcattaaatttatagaaattgtttccccaatttaaaattataaatgctctatgatttgttggtagatctctttatttttagttatttatttttatacaaaaaggtgataatttctttcttctccaatttacagctaaacgctttaagacttattggtagatttctttatatttatagtatcctacgtttttataaatgaggaaacaattcatttaaaagtttacaaccacgagttggtgcaacaatctctcgaatgatatgtgattgttatgcagcccttatttagctattgttcaaattaaaattatatcccatcaggagacattaggaacattcccggaagcttaatgattatgatttctttatttctttgactttcttttagagaaaaactacaactataatcatgcagcttgaaacttaattcactattttaatctcaaggttatatggtatatattaatgtgtgtctctaaaaggaaatattggtcacaccatcatgatcatttatattattttcattattcctttacttggttttctctaaattgatatcatggctaccactttcaaatattaatataaatcttataacaactagatgtcaaatcctgaatccgcttcatctgtatctatgcgtggatttcttgaagtgatatttggttcaaagtttaaacagctataagcaatgggactcttggacaaaattagtcaggatcggagtcaagtaatacaacaataaactagcgcttccgtttacaggaggaatgcaaaacctaaaagatgaattcatatacttcagttgaagaattctacaacaacaatacaaaatttaatcttgtatgcgttatagaatatagtttctaaattattttacttgtaattcgaattgtcaccatcatttaggtaaatgcagttatataacgctgaattctttatctcaaagatctaaaacatgattaatttattatcaagttaagtcatagatcatgatgatgcgagagtgattcatcatccttgatcgataatatgtacggatgatactatatagaaataaacctgatgattgaaaaatccctattattatagacaaatactaaattatcaaaagttcattcttctgttttcttacggttttaaacgaacacaaagtataatctttgaaaataaatagttgaaaaacggtctactgtcatgttgtaagaacttcatgtgactatgtgagccgtgcatagtcaatattgaaataaaacaccaaactaatatcaatgggtttgagccgattacatcacaaatggctatggcaatcggtgaatgtttgtctgcacccaatagtccatactataatgggttcaaatttcattaaatttccgaatttcgatgtctagtccgccaaaaatctcttcaagataatgtttcaaatgttgtaatgtgtgccattgaattcttttataagatctttttatataaaaagttgtaaattcaaagcaattgtcgaacaaaaagccgcgggatttaatcgcaaaaacaatagaaatccatcgatcttacttgaaaattatgtaaaaatgctaaagtttgggcaagtgaatggtatatatatatatatatatatattttttttttttccgacgcagatgaatatctatgtctataagtattacatgattgagtatttcaaatttggaactaatgatctgattataatgaatgcgatataagttaactaaaatttggaactaatgaactaatgatgttattcgaaaattttgagctatactaaagtagcagaatcctattgtcatacaaacttaacttgtttttcggtgtggcaaaaaaaatatagtttaaacccattaaactatgagccattaatttgtagtttgtagagttgttaattaaaagtatgggtgttggtttcgtatagttaacacaattcaaggatttttgtgaaatttccgcaaaatatcagtagagaagagacaaaaggtagaaaacgttattttgtaataaatagcataagacaaaattagaagatacttggttcgattcggaacgatccaacttgatgctattgatgccttcatcattgttgcagaagccaaagccattcccttcgatcatgaaatatggccttattggccttacatgaatttatccttttttccttttagaaagttatttattgatattaagaacaccatttctgatttctacctagcattacaaaaaatgttaagcaaacgtgaaccggtattaacttgaaccggaaaaaaatcagattatttgtttggttcgtatcgtgtatgagcttcctgagataggcccaaataagaaacaaaacaatttaattaatcgtttttatgggcctacataggggttttgcgaacttcctgaattaggtaggcccaaataagaaaacagaacagtttaattgggcttttatgggtctacatcggatttttattagtaaaccggtttcagaatttggcaagggacggcgaattgaattttaattcggtaacggtttgaagttcaggaaacgagcctttttgattaaaccggccggctgtcaaattttgtgtcttggagttcttgtgcatgaatgatgctgtgaaattggaacttggaaggtctcagaagtccgaagcaggcttttttaaccctctcctctcttttttttgccttaaatttggtttaacttgattgaaataaaatctgctggttctccttgtttgttgacggtgtctaatttacgatggatatgtttcagattgataaataaaacgtccggaagcttcaaatttatgattatttgtcatgttctggtggtaagtaataagacctctgatagagaaaacttacttcttccattgaattttctactcatgttcacttttagtaacaaaattgaagagccatgttcctttttcacaatcttactgttaatacaaattaaggtctgccatatatactgtagaactactaaacctgtaagttagtcacaataatatcacattttcccaccagattcattaattttgtctctctgcttatacagaatgcaaaattcttccttttggtagtggtttcttggtattagctcctagagttacagatgtgtgtatatgtgttatttcgttatttgtagacatctgcctccttttagaaatcacctgaaattataaatatatggaagttggtaggttaggcaactaacaatcagctcatatcaatgcctctcacaacaatggacttttttgttggctagtaatgtcaaagaggcacacacacacctatttttgaactcagaaagattagctaagtaaatagatgctgttgccaagtaaacaaaaaaatgtacctacattccttctgtgcacgctgcattattgagaaccagatccttacattataataactccattgtctctaacactgtgtctttaccctgtcaagttcttaatgctgcaattgtttgatacactatagtatcttgcatgagccttggtagcttcctttacctacatattcagttttggctattacggttgctaatttattctacggttctgatacaacctttgacgaattatgatgtaacatcaccaaaagatgagcatatatataaaaagaaagtatacaaagcataaagatgttgaaacttaggaatcagaaggaaacagtcatatctcaattatccaaccacatggtctttgctttaacctttaactttactaccaaaacggtcagttagtgctctgagatgtgtactgtttgaactatcatcctaagttttgcaacttttttccctaaaggtgtgggtcactgttcctcagattctaccaagttctttgcatatcttaaaaaaacaactgagcacaaagtggtcctctaagatttaggcaatgttgtgtctcttttttatcaccttaatacactcatcacatgcttcctttttaattgcagtaactggtaggtcctcttttagctgctactgatgttaactcttttgacagtatttccaaaaacttcctattatctaataaatatactcttataattcccaactagtattgtttgtttgtagctgaggaactgttcctggaggtcagatacgtcttttaattcttttctgtatttttgttttgttactactcttggtgacaattgaaacatccttattgcaaaatttatgttgaaacgtgtccataaaatttatctgaaaaaccttatcacttcccttatgatctacaggctgaagttgcaccatctgttcccttccctgtttaactgatggagactgttccgctactaaagtctccaggtccgaaaatagcaacgtcgctatctgcatgagcctctcaaacttatctatagctttaggttggtgtcactgatattgctaatgttagttatatcttagccataccgtgtttaaatacaattattttgatagacaaaaagtacaagcaagagtttttgcgatgttgcatctacctgcattttctcaataaagtgtccaaagatgtcgttttggcatgtcattttccatttcctttcataggagacttgattgaatcagattagttgatttctaaaagaaaccatatatatgtaaccatcaccatgttgttgcatagtgcattatattggtggaggttgtgaattaatgcttgtgatattctttgattaaagtcttgtcaaatgtggaaactcgtatgttcttctggatcaaagtcctagctacgttgtcatctatatttatgttttgatttgatagtttaacataaaaataaaataaaataaactacatggttaattaggtacaaggattttcccatgttttgtcttgaaaaccatttcgggtcattgacattctctgatatcattagtagttttgtatttgtccttttgaatgcaacaggaccaacccgtcataatcaatctcgtggcatctgttaattggagtttacggtatgtgaatcacaacttttttcaagttcattgattgagatatatatagactatagaggctgttgtcttgttggtattctttggattacctaaaagaaaagttaagaaataaacacaaaagtagaaagcttgaggaattttgctttgctttagctccttctttatgttcttactcgaaattgcaagttacgagaatagtaattacattaagtacagatgagaaatctctatcgtaaactctacatctgtgtgtttatggaccacttcactcactttgtttctctctatacccttttgtcttgtccattgtcttcacttacccacacgcaccaaattatcatcattggcatcatctaaaattattacctagctacttattacccatcttgagttttatttgtttcaaggagatggcgatgagtacagtgtccattagattcgtttcaaaccctcgtaaaaagatttgtactcgagaggtttaatttttgtttttgtatttgttacttgttagttccgtacagtaaagattctatcattttatcgttgaaattctatctgagtcactgtgcggttatagttaaataccctagtaactagtaagcactgctatgagtctattactgacaatttccctgaaccaaaacgatagtgttcgaagctatattaaatgtggacacgtaaattcataaattcccttccttcattcaagcacgtatgggtaaaaaaagaaagatcgatgccgtgaatcttacacatcgtgccgtttcttaccttacaaaacattcaataagggaataggtatagataataagaagtctaatcgttaaagattacgtaatattcaataacttaggttgttttttcttgcactaagttacataacactcaataagagttttattttgttttcaaatctttaaagatgaagatcgagactcacatgatcttgcacgttagggctcaatccgtaaccgtacgatgacattctgttctgagcagcggagccacccacttgcgatgatagttgagtttgagaacgggtcaacaacggtaaagtcgaattagaagaagaagaagagccattactagtaaacgctgcgtttgagttataaacgccttgaacgcgaggcggtagacgccatagtcctaactgactcccatagctgggtcgtgaataataccccgacggcttaggaccagaagaaaatcctccataggacctagccgcggttaacggaccattggtccacgacgggtaatgacggtaactgtaagggttattgtcaggatgataaaagtaagaggaaacaccgcgtttggcaagctgacgttcgcgtttgtgagcgttttggtgtccacctagggcttgtgaagtaggaaaatttctaaagcaatagtgacactcgaatctcctgttgtggctgatgctattattgtccgtactgttgtctccggtttggtcttcttcctcttcttcttctttgtttttggtctggtaaggatcggtgtagtcttcttgaccggtagtaatagagaaatctctgccggtgaaatcttttccgaagacacgaatgggtttagggttcttatctttaggacggcgaatgaaaggaagctgagagaaggattcgacgttcatgaaatcttgagtttctgtttctccggtagcctcgtccatagagagagagtcagagagataaaaagactgggcgatatatagagttatgaggctttagagagatagataaacatttatataaaactgattggttcttattttttatggcaattcattaaattttctatttgttgtatgtcagaaaggttgattgatagcttctaattatcaaagagctaaagaaaggttgatagcttatccttggtctcttaagacttaagaatgatgaacggattgaatataatattatatgtaaaagtcgcaatattattcactaacggtgtggaattaattgtgttagattgtatcggatgaagattatggatctataatgcatgatctatgatagatgcttagacagacgcaaggttgttggaggttaaattattgacttcgattatatatatatacacgaatacataacataaaagcttcgtattcatattttgataaattactaattaagtatatagttttctccgagaaaatgtacttctccatattcatattttggtttttctaatttacatagtggatgggtggcattttcgtaaatatggtagtttattttgtgtaattttatctggtacacaatactttctgaaaaaatactttttttttttttgacaaactctgaaaaattactagttcacgaaaatgccactgtttttttgctaaatttggtcacaatgaaataggtccttgaacaaaatgcaataaattagtttttttttgtatatattcatttccccaacaaacttccttcaaaaccattgttccgcctggttcctgtgatatctacttttgtttcttattaaattcccacaagtgcttttccaaatagtgcacttaattaatatataggacttacgatttttttcaattccaatttcattgagattttcagtttttcgattttaaaagaaattctatagctttctcaacctaatctaggtagtacatataatatgtaacatattagttagtttggtacagttttcttttcgatactaataatttaagtttttgatcaaattggtttttattaaaagaattaatcatgtcttgtctcggttccgttaatctttaccttttctgattcatatggattagattctttaaggatctatttgcccacgggatcttgatcatgaaacaaatttttgtgatgtcgtcgctcttctaaaactcttggacaacctttgatctaaataaatgaaagacccgtttcaatttattttttaaaaacaattgtaaaaaataaacaatactgtagtaatgaaacagacacgtacaacatttatggagcagaaaatgggtcatggtaaaatttatgataagtaactaaaaaaaatctaaaactaggtgaaagttatcagggaattgggttcattacgaacgtacgtgggggtcggtgtgtactcactgatcacacatgtacccggatgttactatttatatagttcgaagagaattctcttttagggaccagcttttacttctttcatttctcttttcttggtttactgaactcttgactcattcccccggctcatagaaattcggttttcttttttgccataaaagtgtgtgcaaaaaaaaaaaaaaaaaaaaaagtgacacagttgaggggaatcgattccaagccttaatctaaaaagaatcttctataaatgatacgaacccttatgacgaaaagaaaataaagcaacttcgattttaaaaatacttaaatttaaatatcggtttagatatcccaaagcacacaacaataataaggtcatcttaatagcaaactaaacgagaaagcaaaattttcatcgccttcatgtgacaagaattataaaaacaataacatcacataaaaaaattcttttattacataaattataaaatatataaagtataaacaaatgcgccagtttagtctacatcgagagcataagcatgaatacaagagaagattgctagtacatccagcaaaccacatcaaaatgtatactttataaaatttcaagagaaccaaacaacttgtgcaacaacaccatttgattgcatagatccgatttgtgacccatgtagctgcgagcagagaaagtatctcggtgggctttagctgttgaatagaaaccgtaaataacagtgttcctttagattaatgtgaggtagactaagatgacacgtgttggtgaagagattgaataaggttttagtctagagctttaaaggtctaatcaatttatgtactttggcattataatcaaactgaaacctcttctaaagcaatatctacgacaatgttacatatatatatatatatatatatattatagttttatagtttgttgggggacatctaaaagtttgtttagtttttcagtttccacttttaataatttttggcattaaattagtttgtctagccattaatataaacttaacatcatttaattacataattgaaaaattttgaacttgaaactagaacttcttttgcacatgcttcgaagcctcggaccatcatttatctttggagattgtttgctatatccgtcggttttatacttcatccaagatctgaatcaaaattcagatggaagaaaaagtccaacatttttataagttacaaatactataggaatgacacattttagacaaaccgacgaaaaaaatacatataaatgtacaaaccaaacaaatcacacaaaggtggtccccgtgaatggagttgaaccccacaaggccttaaaagcccacaaagtctcagaaaccctaacagcaaacacttggttacaaacacctttgctttgccattaaagtcatagtcatatatgtgcttcacagattaaattggcttttgttgaagggaccatttacctctcactttctctgcttcatatcctccttttcttagatgcaactcgtccactaggaccactgctcttctttcatccatctatctatctatacctttccatacattactcatctatttaatttcttataaaattaaactgaaaagacatgtgtaaacaaagaaatgaaattctccatgcaaaaaaaacaaactatatttggtatcaaaatggtatagtcctatagatatggcatttatacaagattgtagctcatatccaaaaatttaaaacattacttggaaaaacagatctcgtagatcaaatatgtaaatgcacacccggtctgcttgaccagctcatgaacggaccggactaggttagcttatatatatatataggttagcttataattgcaatgcattaaatcattaataggcaacagccaacagctctgtattgtacgtacatgaacgatgaagtgaagaagattttaatgggcaaacatatcttgtccctcatataaccaacctcacaagcaaaactttatggtgctaaatgatttttagcagattaaaaacagcaaaaaaataaaataaaaaactatacaacaaatgaagtgaagttaagaacacgagcccaccattgtcttttcatagttaaacttaaacactctagattacacctctatatacagttatacacaatcaatgtcgatacacatgtcttatgaagagaccattttcgaaagctagacttagaccctaatataacgtacacttttatcacaatgttgtagaattttagaaaatgttgcttataaatattagtcttcacttgaacaaaatcattcttcaatcattttagtgggttgaagatatttttattgtctgaaaagctagatgagtttcatttttttaaagcattttgtatggaccacgattcatttaattattataaatggagagagaatcttttcagatattgcattaacgatgttacatgtctagatattatgatgtcatacatgtctcccgacctcttgtcaatttcattttttgtctttatcatttcgtctcttgttggttttaaattttgttagtaatagtagaagtgtagagctagagtactagacatagaatacggttaactccagtttttttgaaaacgtaaacgtaaaaaatttattttaaaactggttcgatatactggtccaagatatccgaccataacccaaattttgtcttttatgatttagaaatgttaataaacaataataaaggaaattatttttaaaaatttgaaaaattgctatgaattgtttttttgaataattcaatttgtacaattctgttatcagccacatcaccgaccgagtaaaagcaacaatccgtggcttgtttttgcttcagaagcgttgcgcaagacatgcagcgattccttagattttggtaaatgggcttttaaaaatcagatctagtggccatatgcccatatgcgtaatagctccaagtcttagtagatggccgggcggtggtcatcaaccaccaagtgctgaattggttgtcaatgggcttttagtagatcagattcgatgggcttaggcctatatgacaatccatacatcctaagattcccactatgctactcggtcagaggttcatcaataacggtcacaactaccacttacttatataataaggtatagtaggttttctaaacaaaattctaatgtgtgcaaaaccttaaatgtttaactatatgaagctggtgaagtatcattattagttactattgttttgaaacacaataaattctgtcttcacaacaattcaccacataaaaatacaactatttaccacaatttcttacaatcaaatacatcaaaatcaaaaatcaattcaactacaatagaaaaagaggcatttattcataccaaccttttatttctttttgtatccatccaaatttatcatctttcgacggaaaaatagaaaagcaccaaagaagtcaacaattaatgccaaatataaacattatacttgaccacagcatttccactggtagtattgaacgtaaaagtcttggcttgtgcatatcctcttccgaacctgaatgctccagtacctccgatgatcggcatctctctcaccttcgaaaatatcggattccggccatacatggacacggtgctgccggaaaattcaccctttgtgaaaacaaagttgaaagccataagcagaccaaagttgttctggtcggccgatgcgaaaattccttgggctctcccaacttcctctgaggttatttcaggtcccaccgtcaatatgtcgtcaacgactgcaaccataccgaaagcggttgcagaggagtttgttgtgggactcgtagcgactacgactgaggttggtttgactccggatacaatgtcatggaagtagaagcgtacgtgggattagcttctccggtttatgtcctgggtatggtgccttcactgttgtggtcactagtttctccggtttatgtcctggatatggtgccttcacatttactataaaattttttttggtaagatacacatttactataatgtggcaacgaagaagtgtctcttaagtagtaatgttttaaataatttttgaaggttcaagataattaagtcaagaataatttttgtttctgagcaaaatcaatacagagataatgttgtataagaaatagggaaagttgggacacgtatatgataaagactcattttgaaaacatgactctacttaaaacgaaacgttattcatctaattaaaattggttaagcatttgtgataatcgtgttaccaaaaaacgtttcttatctctaatgtatctaccattccatgattccactagtacatactagtcttctaatatattcattttcaaaagactattcaaatgtttccaattttaaggcataagagtgtaacctctttgtcctgcttcaccatattcactctgcgcatttgtgttggagttcttggtctagcgttgtggcgtgtatccataaagctgggcatgtatttgtcgattcttgatgatatgcaatgagatagacctcaatgggacagtaacatccaaaggtagaagcacttcttcaagctcagaccagtcaagatcttcagaatccccatcttcatattcaactctgtaccatccagattgtttatcgaactttgtcaccgtaccagaatagtagcgacccaagaaaaacttgcgaacttctctaccctcaagccattccccgcttcctacagtgccacttgatattggttcatctttggcaatcatacaatcagtttgaggttcatcaggcacaccattgataacaaccgcaggctcccccggtatctcgaagatccctggaggatgagactgtgcttcttgcttaatgctcccagtgtcctccattttttgagctatcaactgtttagagaaagctt

SEQ ID NO: 111 - DNA, 105306 bp, Arabidopsis thaliana
gaattctacaacaacaatacaaaatttaatcttgtatgcgttatagaatatagtttctaaattattttacttgtaattcgaattgtcaccatcatttaggtaaatgcagttatataacgctgaattctttatctcaaagatctaaaacatgattaatttattatcaagttaagtcatagatcatgatgatgcgagagtgattcatcatccttgatcgataatatgtacggatgatactatatagaaataaacctgatgattgaaaaatccctattattatagacaaatactaaattatcaaaagttcattcttctgttttcttacggttttaaacgaacacaaagtataatctttgaaaataaatagttgaaaaacggtctactgtcatgttgtaagaacttcatgtgactatgtgagccgtgcatagtcaatattgaaataaaacaccaaactaatatcaatgggtttgagccgattacatcacaaatggctatggcaatcggtgaatgtttgtctgcacccaatagtccatactataatgggttcaaatttcattaaatttccgaatttcgatgtctagtccgccaaaaatctcttcaagataatgtttcaaatgttgtaatgtgtgccattgaattcttttataagatctttttatataaaaagttgtaaattcaaagcaattgtcgaacaaaaagccgcgggatttaatcgcaaaaacaatagaaatccatcgatcttacttgaaaattatgtaaaaatgctaaagtttgggcaagtgaatggtatatatatatatatatatatattttttttttttccgacgcagatgaatatctatgtctataagtattacatgattgagtatttcaaatttggaactaatgatctgattataatgaatgcgatataagttaactaaaatttggaactaatgaactaatgatgttattcgaaaattttgagctatactaaagtagcagaatcctattgtcatacaaacttaacttgtttttcggtgtggcaaaaaaaatatagtttaaacccattaaactatgagccattaatttgtagtttgtagagttgttaattaaaagtatgggtgttggtttcgtatagttaacacaattcaaggatttttgtgaaatttccgcaaaatatcagtagagaagagacaaaaggtagaaaacgttattttgtaataaatagcataagacaaaattagaagatacttggttcgattcggaacgatccaacttgatgctattgatgccttcatcattgttgcagaagccaaagccattcccttcgatcatgaaatatggccttattggccttacatgaatttatccttttttccttttagaaagttatttattgatattaagaacaccatttctgatttctacctagcattacaaaaaatgttaagcaaacgtgaaccggtattaacttgaaccggaaaaaaatcagattatttgtttggttcgtatcgtgtatgagcttcctgagataggcccaaataagaaacaaaacaatttaattaatcgtttttatgggcctacataggggttttgcgaacttcctgaattaggtaggcccaaataagaaaacagaacagtttaattgggcttttatgggtctacatcggatttttattagtaaaccggtttcagaatttggcaagggacggcgaattgaattttaattcggtaacggtttgaagttcaggaaacgagcctttttgattaaaccggccggctgtcaaattttgtgtcttggagttcttgtgcatgaatgatgctgtgaaattggaacttggaaggtctcagaagtccgaagcaggcttttttaaccctctcctctcttttttttgccttaaatttggtttaacttgattgaaataaaatctgctggttctccttgtttgttgacggtgtctaatttacgatggatatgtttcagattgataaataaaacgtccggaagcttcaaatttatgattatttgtcatgttctggtggtaagtaataagacctctgatagagaaaacttacttcttccattgaattttctactcatgttcacttttagtaacaaaattgaagagccatgttcctttttcacaatcttactgttaatacaaattaaggtctgccatatatactgtagaactactaaacctgtaagttagtcacaataatatcacattttcccaccagattcattaattttgtctctctgcttatacagaatgcaaaattcttccttttggtagtggtttcttggtattagctcctagagttacagatgtgtgtatatgtgttatttcgttatttgtagacatctgcctccttttagaaatcacctgaaattataaatatatggaagttggtaggttaggcaactaacaatcagctcatatcaatgcctctcacaacaatggacttttttgttggctagtaatgtcaaagaggcacacacacacctatttttgaactcagaaagattagctaagtaaatagatgctgttgccaagtaaacaaaaaaatgtacctacattccttctgtgcacgctgcattattgagaaccagatccttacattataataactccattgtctctaacactgtgtctttaccctgtcaagttcttaatgctgcaattgtttgatacactatagtatcttgcatgagccttggtagcttcctttacctacatattcagttttggctattacggttgctaatttattctacggttctgatacaacctttgacgaattatgatgtaacatcaccaaaagatgagcatatatataaaaagaaagtatacaaagcataaagatgttgaaacttaggaatcagaaggaaacagtcatatctcaattatccaaccacatggtctttgctttaacctttaactttactaccaaaacggtcagttagtgctctgagatgtgtactgtttgaactatcatcctaagttttgcaacttttttccctaaaggtgtgggtcactgttcctcagattctaccaagttctttgcatatcttaaaaaaacaactgagcacaaagtggtcctctaagatttaggcaatgttgtgtctcttttttatcaccttaatacactcatcacatgcttcctttttaattgcagtaactggtaggtcctcttttagctgctactgatgttaactcttttgacagtatttccaaaaacttcctattatctaataaatatactcttataattcccaactagtattgtttgtttgtagctgaggaactgttcctggaggtcagatacgtcttttaattcttttctgtatttttgttttgttactactcttggtgacaattgaaacatccttattgcaaaatttatgttgaaacgtgtccataaaatttatctgaaaaaccttatcacttcccttatgatctacaggctgaagttgcaccatctgttcccttccctgtttaactgatggagactgttccgctactaaagtctccaggtccgaaaatagcaacgtcgctatctgcatgagcctctcaaacttatctatagctttaggttggtgtcactgatattgctaatgttagttatatcttagccataccgtgtttaaatacaattattttgatagacaaaaagtacaagcaagagtttttgcgatgttgcatctacctgcattttctcaataaagtgtccaaagatgtcgttttggcatgtcattttccatttcctttcataggagacttgattgaatcagattagttgatttctaaaagaaaccatatatatgtaaccatcaccatgttgttgcatagtgcattatattggtggaggttgtgaattaatgcttgtgatattctttgattaaagtcttgtcaaatgtggaaactcgtatgttcttctggatcaaagtcctagctacgttgtcatctatatttatgttttgatttgatagtttaacataaaaataaaataaaataaactacatggttaattaggtacaaggattttcccatgttttgtcttgaaaaccatttcgggtcattgacattctctgatatcattagtagttttgtatttgtccttttgaatgcaacaggaccaacccgtcataatcaatctcgtggcatctgttaattggagtttacggtatgtgaatcacaacttttttcaagttcattgattgagatatatatagactatagaggctgttgtcttgttggtattctttggattacctaaaagaaaagttaagaaataaacacaaaagtagaaagcttgaggaattttgctttgctttagctccttctttatgttcttactcgaaattgcaagttacgagaatagtaattacattaagtacagatgagaaatctctatcgtaaactctacatctgtgtgtttatggaccacttcactcactttgtttctctctatacccttttgtcttgtccattgtcttcacttacccacacgcaccaaattatcatcattggcatcatctaaaattattacctagctacttattacccatcttgagttttatttgtttcaaggagatggcgatgagtacagtgtccattagattcgtttcaaaccctcgtaaaaagatttgtactcgagaggtttaatttttgtttttgtatttgttacttgttagttccgtacagtaaagattctatcattttatcgttgaaattctatctgagtcactgtgcggttatagttaaataccctagtaactagtaagcactgctatgagtctattactgacaatttccctgaaccaaaacgatagtgttcgaagctatattaaatgtggacacgtaaattcataaattcccttccttcattcaagcacgtatgggtaaaaaaagaaagatcgatgccgtgaatcttacacatcgtgccgtttcttaccttacaaaacattcaataagggaataggtatagataataagaagtctaatcgttaaagattacgtaatattcaataacttaggttgttttttcttgcactaagttacataacactcaataagagttttattttgttttcaaatctttaaagatgaagatcgagactcacatgatcttgcacgttagggctcaatccgtaaccgtacgatgacattctgttctgagcagcggagccacccacttgcgatgatagttgagtttgagaacgggtcaacaacggtaaagtcgaattagaagaagaagaagagccattactagtaaacgctgcgtttgagttataaacgccttgaacgcgaggcggtagacgccatagtcctaactgactcccatagctgggtcgtgtataataccccgacggcttaggaccagaagaaaatcctccataggacctagccgcggttaacggaccattggtccacgacgggtaatgacggtaactgtaagggttattgtcaggatgataaaagtaagaggaaacaccgcgtttggcaagctgacgttcgcgtttgtgagcgttttggtgtccacctagggcttgtgaagtaggaaaatttctaaagcaatagtgacactcgaatctcctgttgtggctgatgctattattgtccgtactgttgtctccggtttggtcttcttcctcttcttcttctttgtttttggtctggtaaggatcggtgtagtcttcttgaccggtagtaatagagaaatctctgccggtgaaatcttttccgaagacacgaatgggtttagggttcttatctttaggacggcgaatgaaaggaagctgagagaaggattcgacgttcatgaaatcttgagtttctgtttctccggtagcctcgtccatagagagagagtcagagagataaaaagactgggcgatatatagagttatgaggctttagagagatagataaacatttatataaaactgattggttcttattttttatggcaattcattaaattttctatttgttgtatgtcagaaaggttgattgatagcttctaattatcaaagagctaaagaaaggttgatagcttatccttggtctcttaagacttaagaatgatgaacggattgaatataatattatatgtaaaagtcgcaatattattcactaacggtgtggaattaattgtgttagattgtatcggatgaagattatggatctataatgcatgatctatgatagatgcttagacagacgcaaggttgttggaggttaaattattgacttcgattatatatatatacacgaatacataacataaaagcttcgtattcatattttgataaattactaattaagtatatagttttctccgagaaaatgtacttctccatattcatattttggtttttctaatttacatagtggatgggtggcattttcgtaaatatggtagtttattttgtgtaattttatctggtacacaatactttctgaaaaaatactttttttttttttgacaaactctgaaaaattactagttcacgaaaatgccactgtttttttgctaaatttggtcacaatgaaataggtccttgaacaaaatgcaataaattagtttttttttgtatatattcatttccccaacaaacttccttcaaaaccattgttccgcctggttcctgtgatatctacttttgtttcttattaaattcccacaagtgcttttccaaatagtgcacttaattaatatataggacttacgatttttttcaattccaatttcattgagattttcagtttttcgattttaaaagaaattctatagctttctcaacctaatctaggtagtacatataatatgtaacatattagttagtttggtacagttttcttttcgatactaataatttaagtttttgatcaaattggtttttattaaaagaattaatcatgtcttgtctcggttccgttaatctttaccttttctgattcatatggattagattctttaaggatctatttgcccacgggatcttgatcatgaaacaaatttttgtgatgtcgtcgctcttctaaaactcttggacaacctttgatctaaataaatgaaagacccgtttcaatttattttttaaaaacaattgtaaaaaataaacaatactgtagtaatgaaacagacacgtacaacatttatggagcagaaaatgggtcatggtaaaatttatgataagtaactaaaaaaaatctaaaactaggtgaaagttatcagggaattgggttcattacgaacgtacgtgggggtcggtgtgtactcactgatcacacatgtacccggatgttactatttatatagttcgaagagaattctcttttagggaccagcttttacttctttcatttctcttttcttggtttactgaactcttgactcattcccccggctcatagaaattcggttttcttttttgccataaaagtgtgtgcaaaaaaaaaaaaaaaaaaaaaagtgacacagttgaggggaatcgattccaagccttaatctaaaaagaatcttctataaatgatacgaacccttatgacgaaaagaaaataaagcaacttcgattttaaaaatacttaaatttaaatatcggtttagatatcccaaagcacacaacaataataaggtcatcttaatagcaaactaaacgagaaagcaaaattttcatcgccttcatgtgacaagaattataaaaacaataacatcacataaaaaaattcttttattacataaattataaaatatataaagtataaacaaatgcgccagtttagtctacatcgagagcataagcatgaatacaagagaagattgctagtacatccagcaaaccacatcaaaatgtatactttataaaatttcaagagaaccaaacaacttgtgcaacaacaccatttgattgcatagatccgatttgtgacccatgtagctgcgagcagagaaagtatctcggtgggctttagctgttgaatagaaaccgtaaataacagtgttcctttagattaatgtgaggtagactaagatgacacgtgttggtgaagagattgaataaggttttagtctagagctttaaaggtctaatcaatttatgtactttggcattataatcaaactgaaacctcttctaaagcaatatctacgacaatgttacatatatatatatatatatatatattatagttttatagtttgttgggggacatctaaaagtttgtttagtttttcagtttccacttttaataatttttggcattaaattagtttgtctagccattaatataaacttaacatcatttaattacataattgaaaaattttgaacttgaaactagaacttcttttgcacatgcttcgaagcctcggaccatcatttatctttggagattgtttgctatatccgtcggttttatacttcatccaagatctgaatcaaaattcagatggaagaaaaagtccaacatttttataagttacaaatactataggaatgacacattttagacaaaccgacgaaaaaaatacatataaatgtacaaaccaaacaaatcacacaaaggtggtccccgtgaatggagttgaaccccacaaggccttaaaagcccacaaagtctcagaaaccctaacagcaaacacttggttacaaacacctttgctttgccattaaagtcatagtcatatatgtgcttcacagattaaattggcttttgttgaagggaccatttacctctcactttctctgcttcatatcctccttttcttagatgcaactcgtccactaggaccactgctcttctttcatccatctatctatctatacctttccatacattactcatctatttaatttcttataaaattaaactgaaaagacatgtgtaaacaaagaaatgaaattctccatgcaaaaaaaacaaactatatttggtatcaaaatggtatagtcctatagatatggcatttatacaagattgtagctcatatccaaaaatttaaaacattacttggaaaaacagatctcgtagatcaaatatgtaaatgcacacccggtctgcttgaccagctcatgaacggaccggactaggttagcttatatatatatataggttagcttataattgcaatgcattaaatcattaataggcaacagccaacagctctgtattgtacgtacatgaacgatgaagtgaagaagattttaatgggcaaacatatcttgtccctcatataaccaacctcacaagcaaaactttatggtgctaaatgatttttagcagattaaaaacagcaaaaaaataaaataaaaaactatacaacaaatgaagtgaagttaagaacacgagcccaccattgtcttttcatagttaaacttaaacactctagattacacctctatatacagttatacacaatcaatgtcgatacacatgtcttatgaagagaccattttcgaaagctagacttagaccctaatataacgtacacttttatcacaatgttgtagaattttagaaaatgttgcttataaatattagtcttcacttgaacaaaatcattcttcaatcattttagtgggttgaagatatttttattgtctgaaaagctagatgagtttcatttttttaaagcattttgtatggaccacgattcatttaattattataaatggagagagaatcttttcagatattgcattaacgatgttacatgtctagatattatgatgtcatacatgtctcccgacctcttgtcaatttcattttttgtctttatcatttcgtctcttgttggttttaaattttgttagtaatagtagaagtgtagagctagagtactagacatagaatacggttaactccagtttttttgaaaacgtaaacgtaaaaaatttattttaaaactggttcgatatactggtccaagatatccgaccataacccaaattttgtcttttatgatttagaaatgttaataaacaataataaaggaaattatttttaaaaatttgaaaaattgctatgaattgtttttttgaataattcaatttgtacaattctgttatcagccacatcaccgaccgagtaaaagcaacaatccgtggcttgtttttgcttcagaagcgttgcgcaagacatgcagcgattccttagattttggtaaatgggcttttaaaaatcagatctagtggccatatgcccatatgcgtaatagctccaagtcttagtagatggccgggcggtggtcatcaaccaccaagtgctgaattggttgtcaatgggcttttagtagatcagattcgatgggcttaggcctatatgacaatccatacatcctaagattcccactatgctactcggtcagaggttcatcaataacggtcacaactaccacttacttatataataaggtatagtaggttttctaaacaaaattctaatgtgtgcaaaaccttaaatgtttaactatatgaagctggtgaagtatcattattagttactattgttttgaaacacaataaattctgtcttcacaacaattcaccacataaaaatacaactatttaccacaatttcttacaatcaaatacatcaaaatcaaaaatcaattcaactacaatagaaaaagaggcatttattcataccaaccttttatttctttttgtatccatccaaatttatcatctttcgacggaaaaatagaaaagcaccaaagaagtcaacaattaatgccaaatataaacattatacttgaccacagcatttccactggtagtattgaacgtaaaagtcttggcttgtgcatatcctcttccgaacctgaatgctccagtacctccgatgatcggcatctctctcaccttcgaaaatatcggattccggccatacatggacacggtgctgccggaaaattcaccctttgtgaaaacaaagttgaaagccataagcagaccaaagttgttctggtcggccgatgcgaaaattccttgggctctcccaacttcctctgaggttatttcaggtcccaccgtcaatatgtcgtcaacgactgcaaccataccgaaagcggttgcagaggagtttgttgtgggactcgtagcgactacgactgaggttggtttgactccggatacaatgtcatggaagtagaagcgtacgtgggattagcttctccggtttatgtcctgggtatggtgccttcactgttgtggtcactagtttctccggtttatgtcctggatatggtgccttcacatttactataaaattttttttggtaagatacacatttactataatgtggcaacgaagaagtgtctcttaagtagtaatgttttaaataatttttgaaggttcaagataattaagtcaagaataatttttgtttctgagcaaaatcaatacagagataatgttgtataagaaatagggaaagttgggacacgtatatgataaagactcattttgaaaacatgactctacttaaaacgaaacgttattcatctaattaaaattggttaagcatttgtgataatcgtgttaccaaaaaacgtttcttatctctaatgtatctaccattccatgattccactagtacatactagtcttctaatatattcattttcaaaagactattcaaatgtttccaattttaaggcataagagtgtaacctctttgtcctgcttcaccatattcactctgcgcatttgtgttggagttcttggtctagcgttgtggcgtgtatccataaagctgggcatgtatttgtcgattcttgatgatatgcaatgagatagacctcaatgggacagtaacatccaaaggtagaagcacttcttcaagctcagaccagtcaagatcttcagaatccccatcttcatattcaactctgtaccatccagattgtttatcgaactttgtcaccgtaccagaatagtagcgacccaagaaaaacttgcgaacttctctaccctcaagccattccccgcttcctacagtgccacttgatattggttcatctttggcaatcatacaatcagtttgaggttcatcaggcacaccattgataacaaccgcaggctcccccggtatctcgaagatccctggaggatgagactgtgcttcttgcttaatgctcccagtgtcctccattttttgagctatcaactgtttagagaaagcttaaccacataagtaaagatttcaacaaaaggtaatgaagcattagctcaatcacagaatctcaaaaaccaagtgcatctttcatagttgtatagatttcataaacaaattgtgagcagatacgatactcggatccaaaattgaacgatttatgcgacaagaatccccaaaatacgatcctaaatcttatacgagaatggtaaaattgtcagcatttgagtagcagaaggaaccctaattcccaaacgtccacatcaaaataatcaaagtacgaaagaggagaaaaaactcaccaatatcgctcggcggatgagatggaagagatttggcaaaccgtcgttattcgtagtccgtcgagtgtaaagccagagagtttgtttggaaacgcgaataactctctattcgggattgactaaatctttttgccaaccagcccttattttattttgtctgatttttggacttttaaaatttaaaaagacaaatacacatactgtagttttggtttcattgaacaaccctttcctccgctagtcttgtctgccttcttccgcatctctcttgtcttgaatccgttaaaaacatgattgatccctcgcaggcccggcttagagggtgtgccgttggtgctagtgcacagggtcctttattttttcattcattttctttaagcaatcaaggtccattatacaaacaatagtgtataatcaaactaaaatctaaacatatagaacatatattagaaaacaaattaatgagcacagggtcccacgttttgttgagccgaccctgatccctcaagtcgattccacggtaggttctatctctatctcttcttctcttttactaatccttacttgggtatatttccggtgctaaagaaaatacacgtgacaggattttagtagacttactaggccaaacaatttttagaggtggaagtacaccacttaatttgatgctgatcgtcggagacatctcaagacatatacagggttattgagggctattcgcgttttggtttcgaaaggaaactgcagtgttatcttatcacagcctcaaaaggtagcatcaggacagctacctgatggtgttgagacagtatggctttgggaaagcctatcagctcaagcaaagatggtgagtcgggatagtggactagtggcaatcgaggagctattaaccaattcggtgagtaggaaagatcaaatcatgcaatcgtgaaagaaaaccaattgaacctatatatgaaatctctaacgataaaagaccaatcattgaatcgattaaacaattatggttgatgatattacatccttataagttcattcacagaaagaaagatcaaaatgccagacaaaaaaagaattagatattacgcttatcttcaaaggtaaactaagagagatcaaaatagtatccgtctctcatatcatcaatgagagcatcatgcgtgtgagcctaaagatgatgaattatccatgtcatcgtcaataagctaccgaaaccgatgaaggtcaccatccaactgctggaaatcggtctgccaccacggctcatatctgcttgtcctgcacccattgaagtgtcatccgctaatcgaccattgttggctcccttactgcacatcataagattttaaagagtattgttgaaataaggtatatagatttgaatcatcagtgaacaaagctacacagagaatcacacaagtataaacaaagacatacattcatgtattgaacaatctaagaaccaaatccattattaccaaaataggattagctcttattgaggaaactgaaattgaataattcaaatcacaaagatagtttgaaattgattacctcgaaggatatttgcaagttccctgacctgaaaacacacattggggggaaaattacttcaacaagatgcacatatgtatctgaatctaagacttgaatttctatttcaaaagagatcatcatgataatcctgatttcactacactacactagcagatataagatatcgattcttagaagaaggctttttacttggattgagtgaagtaagagcagcgttattgttgaaattgcaagcttcgtcctcctcgccgttcttcagataataattgttgaaaacaaacgacgccattttctgaacatccgtcgggtcgttacaaggtccaccttgctgaatcggaccacaatcggctccgccttgaccacaagcccactcaatcgccgtctgtagcgacgaatcttccgcgttgttcttcgccacacaccataactccacctgtatcacttgaccgccgatctgcgcagtcgtaatcaccattaacatcgccgccgtcgcagcgagaatagagagacgcagatgagaacactgagggagagacattatcatttccgaagagagtaacgagagagggagaagatcaagcaaaggagtgttgagaagaaggttttgagttttttttttataaccgctgattttgcagtggagcaccagaaagttaccgttaaaggtatcggagaaactggaagatctaacagtgacaagagagtgaatctgaatagactcgagaatattttggaatgtttcgtgaaaaagagaaagattcgggtgtatcatgtaattcttggattttagcgctaaattgggcctctatgttggcccatgaaataatggtaaatgagtgtttgggccttggggcactggccaatgaaaaataagtgctcggattattgacgtggctcttcgtgattggttaatttcctttcagaaaggctttttgtctcgcgaccgtctaattttcttcagtttagcttttccgaggagaagatcagccatggcttcttctccgccgtcagatcccaccgatcgagatgcagaaactctttcgcagaaccctagtttaatcgagaagccgagcgtagtagagcaaggaagtctttccgtggagaatgtcgctgaaaaagccttaaatttagaatcaacacaagacgaagaaacgcagaacttgcaggatctggaggagtccgacggtagagatcagcaattagaagcttcgcttgaggaaagtaggaacgaagaggacgatatggacacgacgcaagccgtaagctcttcttattaccgccgtggaggtggaccaaagcggaagaaagggaatcagaagaaacgaaagcagctagagaagtcaaaagagaaacttgaggtacttttgaaaactttgaagccgatagctttcgctccatgtaaaaccctagattttgctcggcatgagaagctattgaagacgttaggtctgtgggattttgtgcatttggattttgatcaaaatatccgtgaggatctagtagcgaaccttgttgcgtattataattcagagcgtcgatgcagctatgtaaatggggctaggattaacgtcagccgtcccgatttggctcgagcgttgaagttgcctatgaagaaagactttgttgttacagaggaggagagagaacttctggaaaacgatgaatcggttaggtttattgatgagattgtttcaacttgtgttctactgcaaagagatgatatgtggattatgcctgtagagattgttgaatggacaagggatataaagcaaaagcatttggaaaagttagactggcccaaattgctctggttcatggttgagaaagaactgaaagcggagcctccgcttggtgattgtttttttgcttctcatctgcagctgttgatcaaatcacagaaagaagatttgctaaaggagaaatgtaaggctgatgatgaggaggatgatgatgatgatgatgacgatgtaaaggaggttgattttttggtaaaatcaccaaaagaagattgtttggaggttaaggaagaagatgttggtgctgcagattcaagaaaggatgatggtgctgtcgacttgaaagaagacaagtatgtggaagaacatatgctcgaactgaatctcgggcaagagacagtgtcagaaatggtctctggggaagagcgaggtcctgttgagggacagccaatggatgttgaggaaaataagaaagaagaggatgaaaggtgggcatggaatggagactctcatgctggttctcatttccttcgccgttgcaatcatagtagtgccagggagggagacgaagataatcatatagaaggatccatggaaatgggagaagatgaaccaattgaagatgtcgaggaagaggaaactgaggaagatacagaaaagcatgaaggggggtttcctttttttccaaatggtgattccctccagggagttggccaagggaatctcatgttgggagatgcatctccgttaggttacaactctgggttacaaattcatggcaattcaattggtggtgatttccttgcttctaggggtgagatgcatatggctatgggttcaggtagttcttctctgttcgggaatggcaataacaagagggagattgaacacgagaatggtattacttatcattctcataaccccattaataagaggttgaggaccgaagaaccctcttgggatgaaaaaccacccccagttgacatgtgtttggatcagatggcgtactgggcggaaaaagctagattgtcatttgctgaaaaagatcgagagcgtgaacaatctgttataaaccagcagtacctgatgaacgagctacaaagcaagacagcaatgattcaggaattggaaagaaccaagtttgaggagcaacagagaaaagatataatgatctataagcttgagagtgagcttcgtatgatgacaagtgtagttgagggttataggaaggctttgaaaataacacaaaaggcgtcaagagagcacagaaaacgttgccctttacgtgatgataaacaagtttacatggatgtcaaaggttctggaggtttagtcctgagcactactgaaattgaaaagctgagattgaagcaagaagaggaagacaggatgcaacgagttctagctaaaagacagattgacgattttgaacataactggcttaataaatttgaagaacacatggaggcagtagaattgctgaacgagagattgatcgagaatgaggatgaagtgaagatcttgagagaaacactttcggaaagcaagaatattgagacatctgaagttgctgctgctatggaagaaactgctacagaagaaacatgagatgctctcaaggtacgtactatactatcctttaagaaaaacatgagtccctgtttcgttgaattggtgactgaacgttttagtcgcttcctgcatccattatagaggaatcttgaatctactgtttccatgttcaaaataatattatggtgatgtccgagtatatcatatgagtagtgagagtgtgagacacacaataaagaaaaccgattttagtagatgagtagaattttgtaatgactcggaatgtttcaagtatatatgcataagattctagatatctcaaaatattctgtcattattatatccaccaacacttagtaatcttcttctttcgccactatggtttatattagttttgttttgtttttgtttaactgctacatataactgatttttctcaaatttgtctgtccctgtaggtttgcaaatccgtgaagcttttgaagctcatttgaaaaagcatcaatttagcatcttcattttgtatgatagacaatgatgatcgaatccaatatcttctttttatctctttctaggaaatgtaaccaacggttgtgatcaatgccaagtctcaactagcacaaaacattcaatcatcttttgagattcttcaacatactctgatgaacagcttcaaaaactgatttaatcttagacttttgacgattgtgacaacaagtagtagttgagtgtaccatttttggaagaaaaatataagaaataaataatgagaagaaaattgaaggaaaaggttatttaattggactttatagtattagactattagtatattccagagtataaaattgtatataaggcccaatgagaggagtgaattggtattggcactgacataagttaaaaacactggaactgacaacatctcgctttcatacatatcccaacaagtccaacacaagaccactaacctcttgtctttaaaaaactttctcctcttcaaattttctttttataatcctcttcaaaattttaaacttcctactttgtagctttcctctgtaactttactctatcctccatattaactttgactgtctcattcaactttgaaaccaaagtaaaagataaattgtatttgattaaacattatttacaaattgttaagaaaaataaaaaaagaaaagaagaggaaacaaagccaatcatgtagcaacgagaccgtagtggtccaggccaaagaacatagcacgtgaacttacagcttagccttcagatgtctccacgttctcccttttctttcccttttttcaccccacattttcagattttgacccactttgaccctaattactcataaaggtttgattcataagaaaataaaactcactaatcttgttttctttgtctgtaattatacaatgtatgacattcgtgatgtgtttgtattcgttgatatatgtatatattgatatatcatctagattctatatgacatcatctaaatgtccaggccctacgtaaggaagtggctacattagctagtaataccttacattttcacttgattttttcgaaggacaaaaaatgaaaaaaacctgaggttaaaatattattaaatcatcataattaattgattttttcttaacaatgaaataatcgtacgagtttttaaggaatgagaaatcgctttcagtcacttcaaatataaattttgaaactatgtgttaacatttcatggttcacaaatcctgttctttttgtcactagaagttaaacaagtatataaattgttatatttgtttattatatggatgatggcacacatcaaaatttgaaccatgtgaaaagagggaatctttaactattcgattaccctaaatttgatggaaaaaaaaatcattcggaaaaaatatcaattagtacacaatgcatagacactccaacaaaaaaattgaataaacaacaaatcagctaagttctttttacatatcattcccactttccccctcccactccataagaaaaaaaaaaaaaaacagatacatcaaaagcaaattcatcacaacttaaaaaaatgtgattagatcaaataaaaaaggccatcttctttgataaattaatttcttgacacaaagaggttttatagtcaagaatcttttcgccatgaaaagaaagatcttagtgaacgaacagctttagacattgaggagctgttccttctcaacggacggtttgatatcggccggagattgatcggagacattattctccatcttcttgaggctttgttgatgatatacttgtcgaagtctctctatttctctcttcaatgcttcttgatgagctgaaaatattaaaatttacaattatcagtgttgtcaataaacctaaatattcaatgagtactcacatgtttcatgttaacataaatatctatacttatctcatatatatgttcacacatggacagttgttctaacttattaatcatactaaactctattgatcttgtgattcattattactagctagatccatgttataaaataattagctatagatatatataaaccttactaaatctattcaagcaggacaatatatatttcatgtttgtaattttatgaatcatgaagcatgcattgccgcaagtacttccttgtatatagtttatattactaaagaataattattggtcgagcctatatattgtcagtgactattaaatacatggagctagtgaaacttcagacaataatagtaaaaaaaaacaaacaaatttctatagtttgatagtatccctgaaaaatatattcagaagaattttatacaatgttagaaaattgaaaaaaagttcaaaatagaaaattaccgtctttgaaaatcttatcttgtgctaaagctgcgattcgttgcttgatagcactattgtcgacgttgagaagcaatcgctgatgatccaaaaacgcaactcttggcgataacactgacacttcagtcttcattccacaattttaaatgatttgttgatcagtatttaaactttttatttagattgttttacattaataaacatagtatatctttgtgtgtaaattaattacctgcaatgaagtaacgctcctttcaagctctgatatgtattgcaatttcctcacccttgatctctgtgctgattgcctatttgctaaaattctgtagaaaatttcagcaaaaacaaaaattagattttatcgatgtgacactaatttaactattttataaaaacggtgtatcgaattatcagatactattataaactgtacgtgcatgcatgaccttccttggggttttgggaaatagtaaataaaaatgttaattacctttttacccttttagggtcgtgaatacgattaccggagcttccaccggagttttgattcgccgacggaccatcttgtggctccgtcttgcactggctttggacctcgtctgattcgttgtaattgttaccggcggcgttgttttgattggctacattattgtccatgtgatgatcatgatcggacggtggtgcttctttgttgttgtcgtcgtcgctaaggctattatgatcggacggcgtggaggtgttggaggatgaacgcgtgggacccacattgccgttgatgctgtgatgatgatgatgattgtggttattgttgtgtacgtcgtcgttgaacatggacatgaattgctcgtcgtcaaacctatcgaagtggtggtttccgacgccggaggaaggtggttcaaggaaagcaatggagtcgcttatagaacgacggtgagtcccacggcgagtcgctgagaagtcgagaaactcatccatccatgaagggttttgttgttgaggtccagcggttgctgcggctgccgccgttgcggctatggaagggagtttctgggaggagaagtcaggccaatttggcgtcgtcatggttgggattttcggaggaagttgtgccattaataaagatttaatggcacaccagatttttttgtaagaggtcaaatgaaaaacaaaggaaaggatcaaagatttgagagaaacaacaaaaaattcaagtgaggatcaagagagaaattgaaagttttagatgatcaaaatgctaaaacagattaagaaccattagagaaagagagagagaatgggatgagaaacaaaccagagtaactaaaatggctatgtataacaaagagtagttatacaaaacagaagtaagagatagaaagagagagggatgcatgagataagataatttttataatagaataaagcgaaataaaattatataaatggattcgatctcaaagggtttatatctctgagtggggtcacatggggggcgagagagatcggacagctatgaaacagctgtttcggaagaaaaattaaaaagatttgaggtctctcttaagagcaaatggagaatcaggcagcacgtgctcttagtgaacccctctcccttaattttgttttgctaaacttattttattagagagactttttcttttcaaaacagtgtatgatattatttatcctttggaaacattcttatgttttgctcttccacatgctcccgcctttctctcctcctttctccgccgtttgatcatttcccccgccttgttttctggccgtccggcgagctgacacttgggcagatgctaccggatgccctctcgtatttcctctttttaaattatatggaaatcatatgaatgttatgtatatataccactaatcgattcaagaaacacttgtaattaagtctagtttctaactttttaagatttaacctatataagctttatcgaaacattcaacttcttatggaggtgagcaaatgttttggttaaaatgttatcatttgagtcattgtctagcagacacaacttttttactcttgtttaactagtttaacgcatgcaggattactatacatgtaaatgcaaagatcatcatacgtaagtttaggagtcagtgtgtatggacattaatgagtagatagcataagagtggccactttatcaaatgacaaagaaagaatagtccaatacaattaatacacttctctttctgtccttcacatgtacaattaagcttatagagaagccatgtctatacatatatacataaattagctccctagctctatatatatactataaacaattaaagaacaagaaaatcaatcatcagttgtaacatatacataggaatttatgacaatgcaatgctaatataagggaaaaaaaggcaaaaagcattataaaatgcaagggaaagagaagaatgaattgagtgggaggctgagagtagtggaagagtggagagatagagagaaatgagctgttagaaagaaaaggagaagtgaagaaggaaccatgttcatgtgtcagaacatgtgctttgtttttatttttttgtataatattttgtgacttgtgagacctttccctctctatattttctttgtccccaaaccaaagcttcatgtaggccaatccatttgattcattgtttttataacagaagatcatttattggattaaattcactttgtatatccataaaaatatatagaaatctcacaaatacaaacttttcaaaaatagattaatgagatgacaaaataaaaaatatgtaagacaagtttggtttgattaagaatatttttgctattatgtatatatgttaaaatacaagtagttacgttaaaacaaaattgtatgcatatatatattagaacgtatgaaattatttcttagtttatgttccaactgtgaactgtctattgtttcactatttatttaaaatatacaattcaatttaatacaatatttactacaaacaatccaaacatcaatggtggtcctctaacaaagtactctaagaatattctctttaattttctacataagaccaatcttcgaaatttctacaacaagcccggcaaaaacaaataaaaaagctacaagtttaagggattcaacgagaacttatagaaactgaaataacagtttaatcaattagtattggacggctttggtacaacgaaaataaaactactaaaataaatatagttatcaattagttgcaaagtgtagtatataaccatatggttagttaaagagagatattttagtgtggtatcaaatatttcagttcaaattaaaaggtgaaaatggaaagccaaaaaaagctaataactgagccatatagagaaatagaattgttatttttgttagtcaagtgtgggttaacccgaattcaagttccacttgaagaggaaacttcgtatcaaaagacaaaaaaccatgtttggtccggaaaaagttttcttataaaaaagagagaattttccggtaaacaaaaatactgtagaaagtacacaatatataaaagaaatcatctagtaggaggagtaatgttttgatataccaaaaacaaaaaggaagggtaataatgtttgcaaactagtcattatataaaattgaaagtggttgcctatgaatacaaacatgttcatgcaagtgtacttccatgtgcttctcctctcattctcaatccacccaattctgcttcacatgtgcatatgtacatatatgcatattgtggtccgtacgtaacgtttgtttttaaatattattattgttatacgatttacaaatacttatttttctagcactcttaaataaataaaaacaattgcgtaaaatatgagataattgaaaaaataaaatatatatataagctaaagatataaaagtgtcaaaatttaaaaaggttaggtcaccattctctgtagattttagggcgagaaatcaagtcttagggttaagtttaagagttagggtttatgatttattttttgaaatcttaatttgagtttaatttccagggtttatgaagaaatatatacagatactttacagtttataatttggagtttggattaggactaattttaacaccttttaactctcacaaaatctaaactattttcttaattttgatattaattttatattattttcataaaatttcaactattaatcctaggaatatcttatgtttaaaaataaaagtttaacatgatctccgtgtggatcttttaatcaatattcaagtaagtaagttatttttacattcacatagaagtcagaccattataaactaaatccattaaaaaaactacatatggtaaaagactaaaagatggtcttatttccaagtattatggaaaaatgaaaaatgtatttagcttagtaaatatcttgagaccagcaaaatgattgagcattgggaatcggaattctgacaaaaccaatcaaatgtgacagattattagagtataactagtaattaatgtaggcttaaggcttcatgacaccaaactgtaagtaataaatttgggtattagtacatgagtaattcattacaaaaccaatttcagtatcttgtctttagattttttgttgaagccaaatacgttctcgcaaatcttccatctaaaatgatactaacaaatgatcagaagcataacaaaccaacaaaataaaataaatttccagcccataaaattggaaaaaaaaaaaaatatatacggaatcttccgtaacgattcgtacatgttttcactgtcatataatgtcacaaatcacaagactgcatttgttctgatctaatttatattcaattactaccaaaaccataattatttatatggatcacacgtttattttttatacgtctgacattaacaaatacacatggtaaaaactgttggaaaacaacaagtttagttaatagtacagttttgctatatagatcgtaccatttgttttcgtgataataataacatatatgaatctatataattcttaaccgataattaattaacacggaacttacgcgttcataggcacatatgacatagaagaaaagcatcgaattttaaaatagttcaacttgtgactaatcattatgcatgttactgtgttttggtgaattggaaaaagcttgatctgaaagaataataataaaaggcagtttgtataatgataaaaatataacagtatataataaggtgggagcataagtaacgtgaaggcagtttgatctgtcgggaattttttttgtatactttatgctcctaattatggtaattagataagttaaagtatagttttaacttaactcgtgaactcatcattttttttaacaagaatcccgtttctgaactcaaacgcaatcacaaaaacaaatacgtattgggattcataaatgccttaataaacgaaattttgtttttttttcttcttttcttttgaattatagtattgggctcacaacataattcaaaagtctttaatttacttattagatccaacaaacagaagtgatccgacccaatactttgggccgtagttgggcctaaataatattctccgtcggattatttgcgatcacttccttcctcattctcgccgtcgatcagcttctaacggcgcctcatcggtcgtcaagccttaccttctcatcccagctttggtagattctcttctttggtttagctgtttcagtctttgattttacttagcttgatcctccgaatatgagaataatgtttctattatgtttatcttcattcttcaatgtgaactcatgaatctggaatttgggcaaacaaagagtttcttccgaatgtgaacttgattgcttacaaattttgaaacttttttgtttatttgtttgctttgttcattgttgaaattgaacaaagtctttgatctgctcagtgcccacctaatatgatttatggtgtcagatggcatggcttgtggtttctgtttctctgattgttatatggttggcttctttctgcaaaatattcttccgagcaacatctatctccggagctgctattcttgatgatggcaagtagcccgatgatggtttccaccatctcaatagcttctttctttcaaaagctaatctttttttctttctacagaatttgatatctttttgtatttgatttcaggtaaaacccctcagaagaaaaatgtactgtttgttatcgcacatcctgatgatgaatcgatgtaagattttgagaatgtatctctctgtctgttgttggaatcaatgaaatgtcaagattattattgttcttcttcttcttcttatgattatgctgagagattagtcatggacattcttgacaggttcttttctccaacaataaactacttagcttccaatgcttgcaatcttcacatgttatgcttgtccactggtaatatatgtcttctcatactttctaggttggtgtattactttccttttcaaagttgttgaattggtcaagtactgagaaaattctagtttcattgaagagaagagattaatgtctactaaagttgcagattaggttcccttatagtaaaggtgaatttattttgtttcaggtaacgctgatggtatgggaagcattaggaacaatgagctgcatcgggcatgtgcggtgctcaaggtaatccattttgataaagaagggatctattataatgtttcttgtcattgcagtgaagaacatgtttttgctaatagatatattgaacacatgatgtaggttccgcttcaacagttaaagattctgaaccatcctaatttgcaggtttagttctattatatctccccagtacatgtgtatctctttatatataatctcattgggggtcatctcgcaggatggttttggccaattatggagccacgatttgctaacagagatcatcgaagaagaagtcactaaacacgatatccacacagtatgacttggctcttacagcgtcgttaaagacactcatcaggatgtcacttagaaatatttctgcatcttattctctatgtggtgttttcagataataacattcgataactatggtgtttcgggtcattgcaatcaccgagatgtgcatcgtggagtattgtacgtcagacttcttttaataccttagtcatcaaaccgcaaaatcattcctcatcactttgttgtacatgcagaaagttcttgcagactaattcaggaagaaatgtcaaagcttgggaactcgtaagtcttacttttttcccggaacttaaaagtatctgcaagctcctatcatcctaaaagaatacttgattttgtacatcaggtaagccttaatatctttcgcaagtactgtggacctgtcgacatttggctgtcaattttatccgccaaaatacatccgagcaaggtaatcatcataaacgagcagccttggaaaagcttcaaagcaatggcacaacatttaagccagtgggtttggtatgtctcattctctaaatatgatatagtatgttctttacctttgatcatgatgaatgtgaatgataagaactgaaacatgtatcgctgcttttttgttgtgattgtgtaggtttcgaaagctttttgtttcgttttcaagctatacatatgcgaatacacttagtagaatcaacccttgagtcaaaggagctcttgtcgaggcaaagctgaaacgattttgaagaaaagttgcagcttgtagtgttgtggatcactgagacaactcaatttcttttgtgtaaaaatgcattgctacaaactattcagatgtaaacagctacaaaatctgggaactcgaggcataaaacggacaccttatttttcattcctttagaataacgaaaccaatgtacatatatttttttgagggtaatgcaattctgccagaagtaaataaagtttatgtaggaataacaatgccaaaccttcaatattcatcactgtctgcaacaacgctactcttttcaaaattctcaccttaattcgacatttagcttcttctgcacctcatcacgcactttactctgcatttcgataagtcaccatttcaacacatttaacactaacaacatatacacaaccaattctatcttgctatcacgatttggaaaatttcattttgtctatgaaacggttttgaatatcttacatgttaatgatgaaaggagaagcaaaagtgattacctgcagatcattgacctcctcgtccgtaagagaccgctccatggaacggaacacgattctgtaacaatgactcgtcagccctttcttcttattggtgaattggtcaattaacttcacctgtgaatgcaataaaggctataaacaaaggaacactgaagaatatgatgatacaattaaaggatagctgaaaagtaaatttgattcctgtaaaagctaatattctctcccaaacaatcaagatataagatacctcttcaacaagatccccagcaattcctctaacaacttcacaaaaattattctctgtgaacaaatcacttatccagaaactgatgtccttgtaacaaggaggatactgcagaacaaaattttgtttgccatcgttaaacatacaatacagataagtcttcaactagagttcattagtctacgagacatggacattaagtgttttacctttgaatatggcttgaatttcactccaagttctccttttccaaactgcatgtaacatcaaatacattaatgtgagaaaataattcatatttttagacgattagtctcataacctaaaatttgaagttgtcacccaagtaatcacctgggacgtgaatcgttcatcggatgaccagaaaaatcgtatatcaggtatgtcaaacaaaaccatagcaagtctctcaagtccaagtccgaaggcccaagcaacattattttctaatccactttgtttcagaattacttgctcggtcaccccacagcccaaaacctccaaccagtcttcctgaaccgataaccagataaagcttgtgttagatgagaaactgaagtttgtgttagatgctataatttctatccaataacaccaatatgtatttgggaaaaggagaccacacaaaaatagaagtattatatgtctctttaaagcaaagatatgaaaacgaaagactcatagactaccttaaaatatatctcaagctcaaaagatggattggtaaatgggaaatatgtatcaacccatctcatctccaccgaacctggcagccaaaaaaagaagctcagatcaaattatttcatgtatatttccccaacttcttcttaaattaatgaaataatcatcctaaacaactcttaataaaccatctttgaagttatttacacttgctgaagaatatagattgtttattggatcttaatgtaccaaataagtggcgtgccaatccctcaagacatttcttcaaatcctcagcagcatacaaagtggaatccttgccagacccgttccagtcctcaggagagaaaacacaaaaaccttccatctgtaatagataaaaaacataatacacctgtcgagcaaaacagccaaagtaaaagaaaaacacagggacctcaagaatagaacacctgatggaaaaccggataatgagtagagtcaatagaatctcttcggtaaacatccccggttacaaggaaacgactatgacctttcctcaacagctcagcttggtgagcactcgtatgacatctcaaaacagtttgtgagtctacatagtacgtgtcattaagacttctgcttacatgatcagcagggactagcacatcatcaaagttctggtaccaaaaaccaataatgatcacattgaaaaccaagtgatacttctagaaagatgcaaacttgagtactgaaaacgtacttgctttgtggtaacaattggggaaaggtcttcgaacttctcaaacttgtttgagtaattggaatcaaagtaatcgtagatagcgttttttaagataccaatcggatgcttatctcttctgtgtagctgcattcctagtttagagaaaatcgaatctggtacattatttgttggatcatcctctctcaccacatctgaaaattcaataagtgtacactaaaaaatgtcaaatataacttcttttggagcaagtgcgatgttttatgaacttcacttttaagaatcgaatctaagaacgaaccatttctagcgattgcgacgccaccaatatcaacagcagagacgattgggtagcgacgcttcctcattttaggtggagagtaagcggcggaggaagaaaacgaagaaacgaatgaaaatcgtttgaagccattgctcgagagaagagctacggaggctcgactgaagatagtggactgaactgagaaaacggtcatagcgtctcgagttaggtggtatacttaagcaaattctgagagtttgacagaagttacggcaaacaccgtcgatgtagaacggaggccgatgaagaagattgcggcggcgattggcggctgaaaagagaaggagagaaaatctccgattacgaggagagatgacgtgtcatgagtagcagtagggttggaaattttgatggattgaatccatcgattttactattatacccctacgctaaactgaattgtaaaaattgcaaatggaacttatgtttatcctaaattaggtattgcaccttgatgtttattgttttctgattttgttgaaatctcaaatcttattgaccaataagagctttctacataaacttattgaccaattcaatatcaggaacaactctttcaatgtaagaagaatttggaattatggtttatgagatatctcttctcttctgcagttaaacttatctggttatatcgaaaactatctacaagtaaagctaaaaaaatgctttgtaaagaaacagacatctttgaggcttttgtttttttaagctctgctactttattttctcagcagcattctgataacacatgtagttgtaaagccaagctaatcctcttggcttagatacctcttcattaagaggcttagaaggctgttcattaatcggcttagaaagctcttcatgaagcaaacagcatctttgtttcatctcttcgatttcgttctccatcttctcatgtttacgtctgaattcctggtaagcaaatataaagcatagagaaagatctttcaagagtttgtaaacaagatatgtggaattcccaaagagatgcaactagagacatagtaaacatgtgtgaacagaagagctcaccgctagttcttgttgtcgtttctcttcttttttcgcttctcctctggcatttctctgcacttcatagacaagagcagctcctgcaaccttaaagaaggaaaagaagatgaaggcatgtttatctatttaagaaccaattgaattgatgaaagcaattgatcttgttgatgcaaataacttcaactgcagggatctagcagatgcagaacaaacttcattgaaacagaactagaacatcaatggctataaaaatttctcctttcgagtccttaagctatcaaaatctatgaaaagacatgagatttaaggtaccgtgaaggcaaagagttccccaagaagatctgcagcggcttgaacagctctctcttcgttcaaagggcgaataactgcatcagttatacgaccagaagcacgtctttgtaactttgtagtaaatctgtgattcgcctgtccaagaaccataaaagttatatcaatttcaaatctttcataaacccttgattattcttcgtaaatcagaaacttatacaatcagatacaacagacacaagattactcctttcgatcgatgatcatacacaaagattgtaatcaaaccgaaagatgggaaatttgagtgttaaaaggagtcttttttgtatacctgtgcaatgttgatgatgaattgacggaatttgggattaacaccagcttctttcttaagctggttagcgatgggtttgcagatagttcgaagagctagggttcctagcttcagaagcgggaggaccatggtctgctgaactagagacttcggctggctcatgagagaagaaaaagaacaaaggttttagtctgagtttttaggcttttaagcctttaagatcccatccaatcagaccttgccgtgcaaggaaattttgcatttttatttatattagaaattagaaattttcagattcgaatcctgggtcgggtcgggttaaattccgggtctttaaggtgatgaggatactctggtgtttttgctccttgagctaaaaatgggagggaaagagagagacaatggcgtccacaggaatggcgaaattgaaggggagtttctgcgtcactctctgcagaaatcgatcacacgccttgagaaaggaaattcatttctcacttttgcgtttgaacccagaagaagaagaagcgatcacgtccatgaaattcgagcttcgacggttttggtgttatacgaatatcgaaaatcaccgtcttctcgaaaggtctaatagctccgtcgatcggaattgctgaagttttacagccacaggtgtttgtcttttcgcctaattcgattcttttgtcattaggagaaatctggttcataggtattttgctttgtcaatgcgagaatggttttagatccagcgattttataaccctttctagtcttggattccataatttgattatatgttggtatctttgagaatggttagctctgtacccttactatctgctaaaagcttgtggtgtttgctgaaatgctaggaagatttacaaaaatggctgaaaacataatggtggattctcatgtttgggtggaagacccagaaagagcatggattgatggggttgtacttaatataaagggagaggaagcagagattaaaaccaatgatggcagagatgtaaaactttttttttgtcttctagttatatgatgcttttgtgtctaatgccatttcaagcttttactggtgctgttttgctttccatactcctgattcacctttccttttactggtcaggttattgctaacttatcaagactctatccaaaagacactgaagctccttcagagggagtagaggacatgacaagattatcttatctgcatgagcctgcagttcttgacaacttggcaaccagatacgagctcaatgaaatttatgtaagaatattttatttctggttgtaaaaccaattattttcatcttgttccttggttaaaaccattagttaatgcagagataggcgagtctgttataatattttgacatcatgacagacttatacaggaaatattcttattgccgtcaatccctttcaaggactcccccatctctatgatgctgaggttatggagaagtacaaggaagcctatttcaaagagctgaatcctcatgtttttgcaattggtggcatcgcatataggtgattatttattcattttggtgttgttatctataaaagtggcagaagtggattttatttattagtttgagaaactttgcaacagggaaatgattaatgagggcaggaacaaatgtatattggtcagtggtgaaagtgggtctggaaagacagaaacaactaaaatgctcatgcgttaccttgcatactttggtggacatactgcagttgaaggaaggacagttgaaaaccaagttttagaagtaagttgtgatgatctaattaatttaaaatttcagagtttcctacactcaaggggtcaggttgttccgcctaaatcaaagaaatttcaagactatgagcctatgatgatgactctgtccctttaatcttctctggaaacaaaacgtttttgtttgttaagctttcttgaaatttggggatatacccctgcctggacatccttagatcggagcttgttcattatatgatacacttgtgcctcttgttttggtttttggtctaattctttatgccaattgggttatgttacagtcaaatccagttcttgaggcatttggtaatgcgaagactgttaagaacaacaattccaggtaaacttagctcttttattatcgagtgcttccgtttctccttccttcgctttgctcgtctcctgtctcttttacctgctgttagatagatttatcactgctaataataaatattaatgcttttacttgttacagccgttttggaaaatttgtggagattcagtttgatgacgtgggccgaatatcaggggcagccatcagaacttaccttttggagaggtcacgtgtttgccaagtttcagatcctgaacgtaactatcactgcttttatctcctgtgtgctgctcctcctgaggtaggtcttcttagttgttctcatcttttattaaatgaatattgaagtgatagatgatataaaaatttgcaggatgttgagaggtttaagttgggggatcctaagtcatttcgctatcttaaccaatctagctgctacaaacttgatggtgtaaatgatgcagaggagtatcttgctactagaagggctatggatgtagttggaataagtgaaaaagaacaggtttgcaatttcttctttgcaatttgcctgtcacctgttgattgctaataggaacagacttatctgcttttttcttctgtctcttcaggatgcaattttcagagttgtggcttccattctccatcttggaaatattgaattttcgaagggagaagatgctgattcatcatcagtaaaagatgaacagtcaatgtttcatctccaaatgacatcagaactgctcatgtaatatatggctcttctacttttccaactaaatgctgattcttgtaatcacaatttgttattttaggtgtgatccccattccttagaagatgctttgtgtaagcgtatgatggtcaccccagaagaagttatcaagagaagtcttgatcctcttggtgctgccgttagcagggatggtttggcaaagacaatatactctagactctttgattggtaaattttctattttaatgttcaaatatcttttgtacatataacactgtgggtgacatctgctaagtcagtactcattactatgttccaggttggtgaacaaaataaatatctctattgggcaagattctcactctaggcgcttgattggagtccttgacatctatggttttgagagctttaaaaccaacaggtgatggccgtgagcatgcatggttcactttacaagcatatgcttggggtgatatcttaagtgtcaaaacacaccaagtgtcctatcgtctaatatacaaattttcagtagtcttttcccttgactttagtatgaggagttaattgaatagaaacctttactctgagctaatatgatagacatattattagctaaaattgtgatcttaggaaatgatgtcttttgtaagtttccatgactaaagagatatctataatatcacctaatcaacctctactccagttgttcactgacttcttaatgctatccctgcagttttgagcaattctgtattaattacacgaatgaaaagctgcaacagcatttcaatcaggtatgaggtcagtcataggttatggctgctgatttggctcaagagtctgttaattaatctgaacttattaatactgtacagcatgtattcaaaatggaacaaggtgaatatcagaaagaagaaatagattggagctatgtggagtttgttgataataaagatgtcgtggatctgattgaaaaggtttgttttatccagtatctgtttccttccctgtataaacacggattcatggcttaatatttgcgaccaatttggctaattcaaacactggacagtagaaattctctttagagagcatactgccatcatctaaaatacattattctacagctcaacctatgtgattacagaaaatgctagcacttgtagcttaagtccatgttggatatttttcctgaaaattgtaagaacattttgaaaggttcatgaaagcatgtaagagttctatatgttttcaatatgctctagtgtcctagcttactatgcattgttctgacttgaaaacacatccagtatcgttttttttttgtttttttttttgccatcacatgcagtgtcgttatttccattgcttcatgctacgtttttttccctgaaaatatggtttcaatcttttgcagaaaccgggtggtattattgctctgctggatgaagcatggtataataaatttttctccacttgcagctgtactttagtgttttcttacacagtaactattttctccaagtaccattattatgtgttataaacgtttcttctctctgcagcatgctaccaaaatcaactcctgaaacattttctgagaagctgtatcacacattcaaggatcataagcgcttcatgaaaccaaaattgactcgatcagattttacattagttcattatgcaggggatgtaagttgcatttcacactctgttgcttcagaattaaaagtatagagttatgatttttaaggtctctttcccatgccgttcttttcaggtccaataccagtccgatcaatttttagacaaaaacaaagactatgttgtcgccgagcatcaggatttgttaaatgcttccaaatgttcttttgtgtcaggcctctttcctcctcttcctaaagaaagtagcaaatccaagttttcttcaattggcgctcgtttcaaggtgacttgcctgcaaatccattaagacttttaactaatagataagactgcattattggaccacacataagatattgttgaaattttgatgccacattcatcatctgtacggactgacatgtttaagtaattggtgcagctacaattgcaacagctgatggagacattgaactctacggaaccccactacatcagatgtgttaagccaaacaatttgttgcaaccaacagtgtttgacaatgccaatgtcttgcatcagttacgctctggggtctgttttcttctgaataattcataccaacatctttgatgtcttgaggtgttatatgatatttgtcttatgcagggtgttcttgaggccatcagagtgaaatgcgctggatatccaacaaatagaactttcattgaatttttaaatcgatttctcattcttgcaccggaaattctgaaaggagagtatgtatcagttctccccgttaagcttggacctttcttccactcttgtatgataaattgctccttgagtctgtttatcacagttttcttaccttacactaatcaggtacgaagcagaagttgcatgcaaatggattttggagaaaaaagggcttacaggttaccaggtaaagttcctaggaagttcactaaatgtaaaaggaatcccaattttgcatgagttgaatacgtgtagaatcttcagtattctatgaaatttgagtttctcagatagcataactcccctaggtgcgtgttgatcatataaaatctaatttgcagattggaaaaagtaaggttttcctgagagctggtcagatggctgagttagatgcacacagaacaagggtgctcggcgaatcagcgaggatgattcaggggcaagttagaactcgtctgacaagagaacgatttgttctcatgcggagggcttcagttaatatacaagctaattggagaggtgagggccttaaatttttttttttttaatggcgttatggtttcattgatatgcagaggaaattaggaatgctgataaagtctctttttcatattttaggaaatattgcacgaaagatatctaaggaaatgagaagggaggaagctgccatcaaaatccagaaaaacttacgtagacagattgcaaagaaagattacgggaagaccaaatcttccgcactcaccttgcaaagtggagtccgcacaatggctgcacgtcatgaattccgttataaattaaccactagggcagcaactgtgattcaggttctattctcattactaccctttcgtacttaacaagttctcatggaatcattctatctcaagaactataaatgacgttcaactctaatcaacttgcaggcgtattggcgtggttacagtgctatatctgactacaagaaactgaaaagagtttctcttctttgtaaaagtaatctcagaggaagaattgccagaaaacagttgggacagtcaaagcaggtattgcaaaccaatccctgcacgtttgtttttagtatcaagtgttttcaattactcagcatgtagggatacgtagaaaaaagtatctggttttgattgatgtaaaatcatatgtataggctgacagaaaagaagagacagaaaaggaacgcaaggtggaactttccaatagagcagaagaggcagttgatatgtcctttgtactgcattcagagcaaagtgatgatgcagagagtggacatggacgaaaggcaaaactttctattgaatcagaagatggacttgataagtcctctgtattgcattcagaacaaagtgatgatgaagagttgggacatgaaagaaagacaaaactttccatcgaatcagaagatgggcattcagatcagagtgatgatgaagagatagaacatgaaagaaagacaaaacattgcatccaagcagaagatggaattgagaagtcctatgtaatgcattcagatcaaagtgatgatgaagagataggacataaaagaaagacaaaacattccatccaagcagaagatggaattgagaagtcctttgtagtgcattcagatcaaagtgatgatgaagagataggacatgaaagaaagaccaaacatgccatccaagtagaagatggaattcagaagtcctttgttacctgttcagagaagccttacaacacgttttctgttgttagtcaaataacgagtcctattcgtgatacagaaattgaatccctcactgcagaagttgagatgctgaaggtaatgtttctatcatccaccaacattgtgaatagattttagaaacagcgtgctaatatcctgaacaatatattgcggctatcatcttgatcaaatgcatggaggataaattttatatttatggtatttttcaggccttattgcaagttgagaaacaaagagctgacatttccgaaagaaaatgtgctgaagcccgagaacttggggagagaagacgtaaaagattagaagaaacagaaagaagagtttaccagttacaagactctttgaacaggtattattgaatcgtaattttaacaaccatagattatcttccttcctacaatttttactccttggttaaaaaatttaattaataaatctagtacatttaatgatgataagtcttgtttagtgtattccaggttgttatattctatgtcggaccaattctcgcaactgaagtccatcttgagatctccttctatgtcagcttcaacaatggcctcagcgccagttgtgcgtgatgatcttgctgacagctctgagaactctgaagcttcatcaagtgattccgatttcacttttcctgctccatctccttcctcagacaatttttcgacttttaacccgaatcagctgcaagtcattgttcaggatctatcaaccacagaagccaaaggtcagtggtaatagcactaaaatcccatgaaagattgcaattcatttgtgtttttctttttttggacaatttttttaattcatttcctttttgttacactagcctctaaatccaccttaatataaacattttgcacatggtatacattgttaatggaatcatccttcttctcatcttgtagaacaataatattgcaggaactgagagctacgacagtgataaggaagggggcttcgaagattacttttgatcatgaagtgcagacttgatctcttcacaagatttttggagttctgacaatctctttactccattgttgtgccacagggcaaatgttatagtgtttacacttagttccaactgcaatttgtattttcctcaggaatagatgctgcaataactatgtagggtcattaagatatgtcaagttccatgttgttaattgcatacacaagccatgtttgttacttcactaatacaattgttgctcaatttcagaattactaatttgctttgttttgtcctcatcatttcgaggtgtgagttttgaattcttcctgcaattttagttccatgaatgagatcattgttagtccatgaatgagaaaatacagtatccaatatcttagttttgtacgaactacttttcaacaagcaccagtggtctagtggtagaatagtaccctgccacggtacagacccgggttcgattcccggctggtgcaaaaagtatcaatatgctattttttcgtaggtccaaaatttgaacagtcgctatttatacataaaggaagtaaaacactctataaaatccaaatatattaaactttttataagttttatgaaatgtgtcctcatcccaagcactagagcacactataacactggaggcatacatcattacactggttggtgacaattagatcgtaggagccaacagagagagactgggaatatcatgagatcatggatgaatgttcaggaatactccgggtttgccaattttaccgagtaagatagtatatgactagaaataaaccaacaaacgatgccacgagcgtcagcattcttcggcttgactttgtctcaaacacctgcaaggattcgattcaacatatcaaagacacagacacagacacaccaaaaaaacaaacatgtcaaagacactttgcaacacataatgaagctaggcttagggttctgagagagtatttctagtcagatataccgttttaaagcggtccatggttcctgagagaaatccccttgatgaatccatatcattgccctacatagaaaccttgcaaaatgttcagtaacaatagcgtctgtgagcaaatgataaaatataagtatcacaaatattctggtaaataccattctgtcaagcatgcggttatgagtatcgacctcttcatttatatcgccagatagctgtttcatgaaaaaagaaacaaataagaatctggttcaaacctagttgtgcatatagagtccaactacaacaacaatgttgaaccaataaaactatgttacggtttccatactaatcctatgggcagtaagtagtagatacagaaactcattagtgtacaaaatgaattgcaagtgtatgttcctattacgtttagggcttacttcatattcctaatcctactgaaaagtgctgaacacaagtttgaacatgacagaggaaccagaggcaggcttactcgttttaagagaatgactctatcttgcaatccctccaaggcacgctcattctcatgttcattgatctcatgagagtaagaagaagcagctctaattcctccctcttcgatgccatcaaagagagaacttctaccaccacgaggctccctgaaatcaaaattagacctcagcaaagaaacagtaacatcttccactcaatctaaattagatgaatttgaaactgatccaaatctatcagaatacagagcaacagtcctattctactgctccttcagatcttcccgatgaaacctaatctacaaattaacgagctcatgaaaacacatctaatcatcagatttcgctagatcttaacctccaaattctaaccaaagatgtgtttgaaaaagtagcgatttgaaatcattcaaggagagctaaccttctaggattcatcgatcaatcgaattaacgttttgatcctccaacgatgtctcgatttcgcttcaagatgttttccagaattcacctggatctatggtttcacaacgaacgcaaattaaggaaggaaacggttgatatgtcgaaagaacagaaagctctgtgtttatcgttcttaagcgaatcaacactcaacaacacgtgtatacgcaagtaatggataatagaaactatggggtcaaatttaaaatcaataaattgttttggaccaaatatagatttcgttatttccggaataggtcccgcgttttttttctctttttcacgaatcagattctcttctcttttgtatacaaaaaccctagtcgacggcgctgttacaccgtcgtccagatttttcaaacgccgacgaagctgatttagtgaatatggaatctaatggatcagtttcatcgatggttaacttggagaagtttctctgtgagcgattggtggaccagtcacaaccaatctcggagcgatttagagctctcttctctcttcgcaacttgaaaggcccaggacctcgcaacgctctaatccttggtttgttttaacactgctgctcaaaatcttgtcttttttatataaagtctatttctacaaaaaaaaattgttactttgggaaagaaagatattggcgcttgatgaatgtagaaactctgattcttttatttgtgttttctttgaagcttctgtataaggctaaattgaaagtctttgcagtttgattttatagctgctatttgattgatgcacctaaaactacatacaagtttccacatttttacttttagttaatgattgaacagagcttcttcaagctttgtgtgctgatatggtgtgttactgcttgtgtttaacttctggtttatcttttttttccatgtcctgcagcatccagagactcatctaatttgttagcacatgaagctgcatttgcattgggtcagatgcaagatgctgaagccattcctgctcttgagtcggttcttaatgatatgtctttgcatccaatagtacgacatgagttgagtataagttgatccttattttctctgtatcagtataagctttttgattctttcatatcactgattcgctgttaatatattattacaggcagcagaagcccttggagctattggtttggcgggtaatgttaacattttaaagaaaagcttgagctcggatccagctcaggaggttcgggaaacatgtgaattagctctcaaaaggattgaagacatgagtaacgttgatgccgagaaccagtcatcaacgacagagaaatcacctttcatgtctgttgacccagcaggcccagctgcgtctttctcttctgttcaccaactcaggttcttccactcttgaccacctcaacattctctagattatttaatattttgtagcacgttattgattaagatcatcgaactacaggcaagttctcctggatgaaacaaaaggcatgtatgagagatatgctgcactgttcgctctaaggaatcatggtggagaggaagctgtttctgccatagttgattctttgagtgctagtagtgcccttctacgtcacgaggtttgtcaactttcctgtattatgttcatgaacttgaatgtgtctgtttttgttaaaatcttgtaccttgaatctttgctttattgctctcgaaccttaaatctgtataagtgctgccttgtaattgatgcaatttttcttaggttgcttatgtcttgggtcagttgcaaagtaaaactgctttagctactctaagcaaagtacttagagatgtgaatgagcacccaatggttagacatgaggctgcagaagcgcttggttctattgctggtatcttccctaaaatgcttagtttgagattacaacaatctactgtcttagtctttagtctttacttactcttcacattgctcggcccttttcagatgaacagagcattgctttgctagaagaattctcaaaggaccctgagccaattgttgcacaaagctgtgaagtagcattgagtatgttggaatttgaaaattccgggaaatcgtttgaggtaaaaacacattgatcccaaactcttacacttatatatatctaataaatctgtaatgaccccatatcgaaacatttttgcagttttttttcacgcaagacccgcttgttcactaagaatctcaatcattcttcgtcaaacatttaccgacaaaggaaagcaaacattttatacagagagagaagaaactgctactttaacatgtctttatgtacgattataaataactctattcatatgtttaaggttaagattacattgtcttatggtacggaagcttttcattgttgaagaaagagaatcctttgtgttttattttcttgtttcttaaccgtttctttagaatcaaacatagaagagtaagatatacatagaaaataacacatcccaggaatgaatgttatctttgctcatgtcaagttttaacaataagaggaccacactttagttctaagttgtagtactgtactaaagattgaacatgtttacctaactataattaagaagttttaagaatctttattaaaaacaaaaactgtaataaagaagtgtcttacttattggtatttttagacataatgtcccctgaataggatgcaacttaactactttgttctttgtcacttctaaatgctttaattatcttttaatcatttcattggttttgtttatgcgaagtttgattagtctcatctaatccaatttggaatttcccaccaagaagcttctctagttgattactcatcaaatttcccaactgattgattagtgacaatgacaccaatggaacacgatcgaattcttgtccttttcggttcttactttatttttgtctaaaaaatgctaaaacaataagaagaaaaaagagtttgaccaaaaagaagaagaagaagagcacaaaagagtagcgaagcccttgactttgacagtagcaaagctcacacgtgtgaccaaactcttttttgcaggctcagcggctttgacagtgggactcgcacaatttttttgaaaaaactacgaataagttttttttagtatatggttataattgaattaaggtccttgaattaaatgttttactagtgttctctcactcgggagaaaaactttaccctcaacataacccctaagattgctgggcctagagacgaaaagtctaattgcacaggtattctaatcttgatatccctaatgggctttatgttcttctactctagtctattcgtacacgcaaacatatttgatatttgtattgaatatcatttcgattattttgtcttgtaaatctacaaccgacccagtgatactttaaacctagttgatatataaaaagacgtagcaacataagaaattgggggttgtatcaagtagttcaaactagttgctaagtggattgtatgctcatactacttttcataacatgatattatatatatatccagatattagtggatgtgatcatgtagatgaaccctaaatccatatccagctattagctacttgctcgtacaaaataagaaacatgggtctcatatatccagtgatccttttagcgcttaaatagaagtagacgaatctactatagatatggtccatagtttgtggatctattagagcatttgcattggttaactattggtaagtgtgtctttaaaatttaataataatactttttatttagtttaattatttaatttatttaaaatatgaaaacaaatgaggagttgacacggggagaaccatataagagagagagtattcaaatgtctttgggtagaccctctgtaactaaaaatgactactgttctctttttataatattttctaaaactaaagaccctcatttttacgtgaaatgcagatggtcttaaaatgtatgtatatctttataactcaattaattagttaaatctaggattgcgttttacgtaaatgatgatatatcaatgaacaaagtaaatatttgaaattaactattagcaacaaccaggcaactaattaaattttgcagaacagttagagttagaaccaaaatagttttataaaacttctttttaaatccggaaaaataaaaaataaaaataagatgagaagtcataagtgttaaagttgtgtctacaaaatttgaagataatgatgaaacatcgacgaatgtatgtatttgaactacaacatcaacaaacaaaattatatgtagtctgataagcacttcttgataaagatgtcacagacaatcgattcgataatgagcattaattatctatatgtatataactgatatgccaataatttggagagtatatccaactacttaacatgtttacatacttaaccaatatcgagggaattttcgaccatgttaaaaaaaaacttttaaaaaaaaaagatcataatttactaagaaatgatccacaatccgctttctccaatatcgagggaaattcacgaccaggtcaggtgtactaaagactgtacgtactagcagaatctaaagaatcaggacaaacagagtttggcgagctagttagggatttctgtcgttttatcaagatcatgattaaaattgtgacgatatggagaagaataacatgatatattttgtgcaaatataacactcaaaaatcgaaatatactctaaaaaaaacatcttgaggatgtaaatatatatctttatatatttctagggcatctactacttttatttataaatacaaatccggttctttgagctacggaacattttcaatcgaaactaaaaccatcaaaaaatcttcaaacattatatataagctatatattatatagatcggatatagataagaatcaacccatattcttgatagaaccatatcacgagaaggagatgtagccaaaatttgctgattgaagctctttgagatgatcctgattgaaagtgttcaggtgttgttccaagtcagagtagatggagaattcccccatgcctgaggaggtttcgttgtggtaactactctctgtggcatccccgtgttgaaccgtcccagaacttccagtttggtaaaccaaatgggtctgatcatgatgatgataaatattttgatgatcatgatgataaggagccttagtagtgtctccatagtaactattagggttttctgatgttggtgaatcagcaaaaatcatgctttgtgctgcttgttgctttagaatctcaagttctgcttgtaaattcacaacctataaacccaacaaaaagaactaattaattacaaaatgtcatgccgattaaatatatttatgtagatatacatatagttttgtgaaagtatcatgattagggttctgaaaggtacctgttgttggagagcaaagatatgagaaacacagccatagatgggatcttgaagcctagcttgagcttcataagagattgtaatagcggcttcacagcgatcgctaatgggaagatgagagagcaacttagaagcattgctagctccaaagaccttgtgaatggctgcaaagtgtgaagctccttgttcatgacaaaagtatggagcaaacacacatccctttgcacatttcctcctaaggaacttacaagcaccacaaggagagccagagctagagctggaactagtcatgatgatgatggtgttgtgacggttcttgatattaaaggtcgaatttaatttttgtgattaattgctattggtattaggttttgatctaaccttgagtatagctttaaggagagagattttataaacaaggcaaaggtgaagatgaaggtgggttacatataatattacatttgtttaattgcatcttgtctgcttaatggtctacacttctcattatttatttttattcattccttttgcattagtacaattttgtttttcttgttaaagaaatcgacaaatctttttggaattttgtatgcataaaacgagagatttagtattttattttaattagggggaaaacagccttggattatttatttttaataccaaaaaaaagatattgcatagtagaacagaatggacgtgtacatctctactaaaccaatttgattaaaccgaaagcaaaattataaagaatagactaattacacaatgggccttagttttttttttttttttttttgcctctacacaatagaccttctaacctacccttccagagaccatctatttactcaaagtaaagttgagttgattgtcattggaaatttggaacgtaaatgtctatatgatgtgtttatcatatatttctgatattttcgtatcatttaaaatgaaaatttcatcattattctgtctcaaactacaacatcttgatggtaaaaaattttatcgcatagcagttgtggaaagaaatttaccatcaatatataaatgtaactatgaaaaaaaattacaatatcatcgaagactactgatcacccattacagttactgtttctacgttttaaatttaacattttctccatcctctatcagtggtacgtggtatagtggttggagcgcctaaattgtaaggagactgatcaatacctcaatccttcaagaggcttattgtataccaataattaagggatccattagtgaatatagtattttatgtgtgtatatatactctaattgtggacctgctcctatctacctacattctttcatataatattaaatatatattggttaatcgatctggatacgatcccttgaattttctaggagacctaggctagatcatatatacttatacacatgcatgcgttaaacactcgtgtatatataatatgaaacaacatatcttgcatcaaaataattcataaataacttgttgatctatcataattgcttgttgcaaaactggtctattattacttaactttacaaaccatgctctcgtaaaactagattctttgttcagtccatgcatacatttctttgaatttcagataagagagtaccaaaaaaaactcaatacatgttaaacaaaaaaaaatgtatatattaattgggactttaacttatatttctaacatgtaaaagaaaatgtgccaacgatatatagagacaatggacaaacgtctggtatatgatatatttgaacagtacgtagggtcagggttgtcgagcaatactgagaactataatcttaaccttaaaataatatattaattataataaatttatttgagatttaagtgaacacttaaataaaatctaatttgtatcacgcatataaaccatcatgtagacctttttcaggtggcaaacaaatcagttctcacacccaagagctccaataatgacactcttgatcccataaatctctcttgtcctactactactctcaagttacaaaattatactaatatacgaggaacaaattaaaatgaactaaccgtagtgatcaaacggttgaaaactctcttgctaatatcaagatcaaccattgaatcatctctattctgatttcatcttggtaaatttatacattaattagtaatagaaaacttaaactttctatatatagaatctgagataaaaaaaaaaaaaacaaggcttggattgagaagaaatcgtgtataaaaacaaaacaataatattagcagtatatttattcattttaagtttctaactttattagttgttgcacttgcgaataaaatagtttaaatataatatgttatatgtaactaaacgtgggtggggatgtggattaaaaaagttggttaggtcgattaactcttatagagtctttctgcactatgatattcaacaatcagatctattaaaactacgtagtatatgtttctctatactttaaattttcttagaattcgtatcgtcattttgtgaaaatgtattagttcacattattcatctcatattttcgatatgtctatcatactttccatatagttttgtatattttatgttcaaatattaccgccactcataacgaaaatagctactcaaaaaccctttttatatttattttactttttaggttatcttatttaggtcttattcttaacctttccataatgatgaggtcttacaagctgcgagttttttaatcataatattttttgtttttcgatttttttttctgcatgtttttaatcataattcaaactcctatatttgaactaataaaataaagataaatcacaattgtacctaaagatgtgtataactaaaaatacttacacgcttgattagcttgattaatagttactagattttaacccgcggtatatcgcggggacaatatttttttttaaaagttagtatatataaaagtttgtaaattgtatctatctattaaatatttttattttatagtttacaattgttattaagtaacgtcctgccaaacccattccgccaacccgtcctgtaaaaaaacctatttattttattaatgttgatcttatttatgatatgtttatgaattattgtctaaatattttgtaattttgtagtaattaactactatcaaatatctctgcggtttgatgcttataatcgaattgttaaagtcatgcaaaaaaacaatatcaaaaatgataattttgtcatttttaaatatgttaaatattttgaaagttttattttactaactaatcgtgtagttaatgtagagatatttaattcgaagatagttaaatgtaaaatatttaattcgaagatttagtttctaattatcaaaaaaaattattaaatgacagtggaaataagtctcaacttgaggatttatttcacaaagtgaatgcaaaaatgtatatgtagattcgcgtatataaatatatatttatacgcgtagaactagtttttttttttttcactaactagttttcagtacgagcaaatcaaaaatatgctttaatatgcttgattaatagttattagcgtatataagtatgtatacgcgtagtgactagtaaggcctcttggtgtagcgaaaggacttagttttgtttttttcttcgatcatttttgtacgtaacttcgtttaaaactaagaaaacaattagacagaacaaaaacctgattaagtcatcttccattttaattaagacagcaaatgagcttttgtcagcattatatgtgtaagcagacaacttttcatgttctcgcggaacacttcctttcaccttctctactctatctccatcaattgctatacgtttttaaaaaataataatttattcctattttgattaagttaataattaatttgtttcttagtcaagtattaattgaaggtctaaccaacttgaactcaatcgactactaattcttggtgattatttaccatcaaaatggattcatattcgagccattctctgagtaatatataattaaggaaaaacctaaaatatactcgtgaatccacaaaatgtttttacgaaagcaaattttaaactttttaggattggaagacactatactagttgaatagtcgataactatatatttaatcaatgaacagtgataattaggctatctagttggatggtgaacatatgactaagctagtcaagtgacattctgaaatgattaccaagattggggaaaacttaaattataaaatattagttctccaagaatgttaaaacatttatctcatatttaaagttcagtagatcttaaatgatatatataaaatatgtatatttttattcattatcaattaattttgaattggtagcctataatctaatatacactataatactttttttctgacaaaacgctacaaataactcttctctaaataatcaccaaactttttggcatattataggataacgtgataatgtgttgatcatgtaaatgtcggtgactataaaatcatgttggaaatatatagttcgaagaaaatcaggtgcacatacatagttgtataagatagtttaaatgcccaaatttgaggaaatttaatggtttgatttcgtaagagtaaaatattgtaatgtttgaaaaaataacaggttatgtatagttctccgcctgttttgtcaaattatttgtcatttttatgggacaagccaaatagaaattgaaaaagggaaaaaaaaaatagtcacaacaaacagttataaatcttctcttttttgtttatcaactaaagttatagttatatatgttctaccaacaaaaaaaaggctagagtagagaccgtaaagttgataaaatattaagaaaacgagagaaaggacaaacatatcgccgcacgggtgaacagttctttatatgtttggtctttaacgagtggatcctactttgaccatccgtccacgtcacgcgctttcttttaacaactcattctccatcccattttcactttataatccgatcattaatactcaactatttattcgttaatcaaatcagtgttggtctcaactaaatctcaatctatcatagattagttttgatccctaatataataagagatttgatgacaacaaaaacagagatttatgctatgtaaattctgaagtttaatcatcaaaatggtcataactatttataactttaagttagagtttaaagagtttaacattagttatatccttaaaattgaatattgttttgatgaaatccataagcagaaacagtaaagaacgtatacgactagtcattgttctatttgatgttaagaatatagtcttttatcaatttctaggttattaaacattgagatacagctaatgatacaaataaagtatgaagtatgcttaacctcattaattatgtacataatacaaagagccttcattcgtttgagcgtaatatacatatgatatatgacttgttggtaagattagttttagactaaatattttggttttgagtatagaaataaaatgttggaaaatgatgctgacctatctgaaccctgacgagggtcaacccgacaacatatgatctcacgtggggccatcacacgtgtctggaatttaaacgatttatatacaatggagacttcaaatttaaattacgacataccagctagattaacacacataaatccacacgtattcgttgtatagtaataaatgggatatgtcatattgtgcattttaaagttggcatgtaattctctactatctttgtgttcgtttgataacaatcatcatacgtggaggtacttgggcatatatattgcaaaaaacagagaaaaaaaaatctttatttaacaaaactttataaataattctttttccagctactatctaatcaggaaaactaaactcccaacaaacaagaaacgatgaacttcgtgaattcttttgaagcagatgatacatttaacaaaaacacaaactgacagttgcaataacaataattaaactttttaacaaaaaataaccataactaaaaagctaaatgttctatagcatcctccaattacagtagtttaattttagtctaggattaattaagttaaaaatgtgtataataaatatgtactttgacgaaaaggcaataattcaaagtctaaaccacaatataaggagatggtttactcaaatcaattaagttagtgagagtgtgacaaacaaagctgtcttttaaaatataaacaagtgataatcaattttgtatttttgtgtgcaaataatcggtgcaattgatataataccttccaaattacacctaagaggcgtaatatacaaaatgagaaaaatattgttttcttaatagacgagtaatgtatgtgtataagcatgaaccgtaaggatatatattatccaccaacacaaaaattgagtgatatatacatgatatattaatacacaagcatataataagtaaataaatttatgtatagcatgcttgcatagcgtttcaaataaatacaacatttgcatatacataagttccttcaaatataaaacttactataattagtctagaaacgaaagtgttaagcttcaaaaaattactttatgtctattctgattttaacgtacctttagggtttggatgtaccctcgaataaaaacttaggaatacagtaaaaaaatatctatatatactttgtacttttgtaggataattgtttatttttgaagggctaatagtttggccactaaaatttatttagttttttttttccatatttaagtgaatccacaactttaaatatcttaaataaaatttgtttgttaattataaacgtgaaaacagaagaaagtatttgtgtttaaaaaaaataatttggctgaatattacattttcctatttctatctgttttagctatcgtaatgactactgagcatatgatcctttttgcacatatgatgttataagaaaaaatatgtttgcaatttcacttatgtaattgtaaaaagggaagttttggttaaataatgcagttttctgttcatatgtgtgttatgatcatttttgacatatgtttttttaacgataacatgaacacacgatcgaaaatggacgtttttgaaacaaatttgatactctaaaatattcggtggcttcaaactttaattaagtatcatgagataatataggtgggtctatatacacgcagaagcaaaaagagaaagaaaaaaaaaatgaaaaatgaaaaaccaatcatccagaattcggaaaggaaacacatgctaataaacacgaggcaaaatgcggctagggaaagacgagtttgtaactactaagatgaaactaatgtacgtgtgtgaatacatgattcgtagaagtttacgtctgagttctaaacacttcatgaagtgtcaaagagaactaatattcaaaattgatagtgattagcctgagaaactaggagtctctcaacatttcaattttgagttttctatatcagtgttatcagactttggctaatttttaggctaatacaattttgtttgttcataaaaaaaatagttttctgcatgtcggaaaaaaacatttctacatcaaatgcaacatcaccacatgtatattacagattacatatttgcatattgtatgaaatatcaatgtttctgatggagctgcataagagataacacaatgaagatatactatacagaataattctatcaactaaaatattttttatttttataacgaattgtttctaatcgatgaaaaaaagaaaactaatgtatatgaacacaaattaagaggctgctttccaatgggtctatgtaattgcaatgcatgctgtctagttattatctcttggatagtaaaatgaaacccccccccccccactctacttgcgcttgcgacctatatataggcctataaccctactacaattagcgctatcaatcagtgaatttacaccacttttcatcaaatcattaatttcactttctaaaattaacattgagtgggtaaaaaaacaaataaacctagggtgaaacaaattgaactttttatttataaggctattatttatttttctttatataactattctgggttatgaaatcgatttaatgaagaaattttttaaaattatgagatgttaattgatttttctttgaaatggttataactaatataccaaaatataattaaatcggattattattcgtttgactcatgtgttttcaaatgattttcacttaagactgatcgacgagtacatcctacttggatcatcatgtttgggtcaacaaaccatgctttgatatcatgtgacaaacgtaatttttttgattctaaacgatttgataatacatagattagtctatacatccattatacattattttatatattctaatttaaaatatggatcatatacaaacgtatcccatttaacaatttctaaacacatttagtttatttttaaaaattgtttataaatcgtatatacacaagactggatgtaaaatcacataataacaccaataatactaatgcaaataaataaactacagatgtgagtcaagtactgtactatattggaatttttttgggtggggaaaaaagaagataacataaatatatatgtgactattaattaagcccgacaaataggagaattgtggctagaaaagaaaaactttgtaatataaatattacaaagacacacttaataatgtctgataaaagaaaacgactttatgttatgtgatgcacacaagttggagatttttcttaaaaaatagattgatatgggacataatgcataacagttagttaacacaaatcaacatgattcatatgtttatatttctttaaaaagaagaaccaatatccaaagcaacttataattattctttttatatatcctttcctttacagaaactataatgatgtttaattaattaattacgatttggatgagtgtggtggtgttagattaggtttgaaaaccctaaggtaatcttatgttgttctagcaatggaagttaaactgcttccactgaccctttatcaatcggatgttcctagaacatataatctttcagacaatgtaacacacacacatttgaacggattttcctagaaatttgtcctagatatctaaagtcaatgcattatcaaactagctcatgtcaggtgactaaaattttaactaactttcaaattggatttcattgctcaatcttgcaagagaatatgtgtttatacttgtctttgtataatgtcatcctaaaaatggtggtctcacacataagatctcgatcatctttgacaaaagatttatttccttgaaaatgtagtaaaaggaattattccaccttaaattcaccattgtttttaaaatagtcaaaactgtcactagcaatggttccaatttggatcaccactataccaagaactgaaaaacacattgcacgaagacacattatcggcccattcttaaagattcatggttagaaacttctggacttagttgggcctattttcggcccatacaaaagtcggccgaaccgaaagaaacaattgggtatttacgtcttttcacgaaggaacccgaaagaaccctaattatatcgttcgtaattgtgtgtatatatatagattcctccaagtcaaccttgacatctcaaatctcacatcctctcgccgtctctgtttcagtcatatttgataatttcccgatttaaaggttgcaaatttgttcgtttcgttattgtgttcttcttagattctctgttttctgaaaaaggatcgatttttatgtttgttttgaagagatatgatgatggaattagatttccctattggtttgatcgccgttatgatggcatcttacgtattagctctatctgatctctcttcttcttcaatttttccaattacatgaaaaagtcttgagctttttaatttattttagataatgattaacgggtcttagagatatagaaagagaagagaatgaagtgatgattgaactttgtttccctattggtttgatcgccgatatgatggcatacgtattagctctatctgatcattctcttccctttaactctgttttttgataattattctgttattctctgtttagtatcggattcttacttccaagaactatgtatgagataaagacaaccataaagagtctgaaataagtggatggttacataatctaacgatttatgctgcataagcatattatgcattgaaaatttggagcttatgctgctgaaacctcttttaagcactcaaacattgactcagtttgaaatatatctggaatctcgaagttctaatgtcgatgtagtggccttgaaacagagtactgcatatcttaccttcaaaaatagagtactactgtactggataaaggcgacaataagaattctggatacttgaaacggctgaacataggtggatggatagttacataatcaaacgctttaggctgcataaacataaataaatatcactacaccttcaaagtactattgttgttgtggtggccttgaaacaggataatcgacatattgcagcgtcaaaaattatcacaagcaatgaaactaagggggagacagaatcacgaaaactaaattagtgtaccaaataaataatcctcagcttcttataacaattgaaaactagcgttaaagacagatttttgctaacatctataaccaaaaaacttgcgttaaaggtctttacaatgggaacttcttatttcatggggaagtctcttattttgaaacctagacagcaaacgcacagtaccagaacaaacgtagtagagaacgtaagtcttcaaagaacatcatccaacgttagaggagaacctctggtgaccaacaactttgacttctctctctccataagagcttctatatctgagcacttctgcttaaaaactttcatttcttgcatacgagtttcaccaatctgttcttccttcttcttttccttaacttcctccagcttcttctccaaccaatcaaccttaaagccagaaaacttcaggtattgtaacgcattgtctcctcccacaagatcatcattggagagctcttccagtgacttgcacagtgtctcaataagacttaggaggacatacatgcatgctgttctcaaatgttgcttctttgcttggaatattgatgcaatttctgggtatctttcaaaaacacggcttacaaattccacctgcaaatacaaaaggatgaacaaacttaaaatcccacaagtatacatgtcagaaacaaatgataaagtcttataaattataatgtttaaatttctaaaaagtttgcatctttatttacctgggaaggaagaacatgaaacacattgacatcaatgatttcttcctttactgatgaagtttccttaagcaaacctttcgattccacaaaagcctctagctttacctttttcagaggttgtgttgcctcttcagattcctctaatttgccaagagcttcaacaacatcaacctccacaacaattttgacctcttcattcaccagaaacccaccattttcagccttaagttcggtaagaggaagcattgctaagaaaccccaggccggagtcttttgatcaaaccacatttgtgtttctgtaacaaaacaaaaagaacagaatctttgtgattataaaaactgaaactttggtttgtcaacatttaggcgcaatcctataaaaaaataatcataaagttgtaacctttcagtatggaaagttcttccgagagttgattaacaacatttaggcgcaatcttgtgtgtcgtttccagtcacaaggcaaagttttgaaatcagtaacaaccagaaacagagagaaacatctattatccctaactcctttgggataggccataagacgcctgcaagcaagcaacaaacattgaaaacaatgcgattgtgttcatatcaaccctacataacatcaaagaacaagttaactttcttaccatttgcaagaaccaactacgaatatatcagaaaagactctctcggatcccaaagatgagaaatttttaatcacccatctgaacttgttatcagcttctttctccattctaagactactttgcaattcgaacgagtcagatcattcagatggcgtggaaccctagaacccaagtggcacacaagtatagtaaccaaaacacaagtgtcgaaagcacagtgtcaccaagactaaaaccagatgcataagcttgtacagtggctaagttattacagcttacggaaaattcgggctatttgtcagcccatagtaaagaagcctcagggtcacaaattttagacgttgaattggtcaacccaagaagctctgggctaatataaacgaaacacagagtccattagattggtgaaatggcctaatttcttattatagcggaggaaggcccatatagaaaagaggcccaaacttcaaaggggaataagaaaatgtggatgagcagcgtagtcaacgaaggtgtagagaggaacaagtgtgtatcttccataatcaactaaaccgtcgtagtttaatttagtcgatctttgttttagatcttacacttttttggcagtttgaaaccaaaactcacttactagagctcctaaatagtgtgttctgacataacaaatccttgattaccttaagcagcataaataagtcaattaattcatgtgaattcttaagaaacattttccatttttaactaatatggatattaacacgtacgtattctttaaactcaaagcaataatctgtaggccacctttgaaaaaacttcaggaaatacatgtaattatcattacatatatgtcatgtgtgatgagaggattaagaggaagtcgttatcaccatcatatggataagtgacttgtctttcaaaacgtaatttacttttactctcatctctcgtatacggtatactaataatttttactcactgtttcaaacgttttttttaatcggtttttaaactcgaaacatatactatttctgctctcgtattaggtttttatatgagctcacattctcgttttctggcttgtgtgtcttacgttcgtttcattgctgcttttatgccaaaatcctttactttagtgacgaaagaatcttctctaatgaggtttgaagagaattaaaaagttatgataatggaaactggttttccctattgatttgatagctgaaattgaaggcatcatcaacctttgtacagtattagtcattcccataggtacaaaaagaaaggaagacacataggtctgtctagctatctaagttttaagaagactccaatttcgaaacatagactcaaacgaacaaacaaacaaacaaagaccagaacatgccaaaagtcattaaataacatcatccaatgttagaggagctctagctgttaacacctttgccttttctttctccagcatagcttccctatctaagcacttctgcttaaattccttcaattcctcctctagttcttgaattcgagcctcaccagtctgttcttcctccttctttttcttcacttcctctagctttttctccaaccaatccactttaaaccccgaaactttcacgtatgtcagtgcattgtctgcttccacaagatcttcatttgatagcttctgaggtggttggcacaatgtctccattaagctgagcaagaaattcatgcatgctttcctcagatgtgggttctttggacggaaatcttttgcaatgtctggatgtttttcaaaaatacgcttcacaaaatccacctgcaagtgaattaaaaaaaaaagcaagatttttgataactcttgtgaggttgaaatttctacaaaactcttaaaagttttcttacctgggaaggaagaacttgaaaaccattgacgtccatgagttcactaaccggtggagtctcgttgatcatcaaatcattagactccacatgatcataatctacctttacctttttcataggttgggtaacttgggtttcctcttcagattcctccggtacatctagtttgccaataacttcaagaacatttacctcagcaactatcttgagttcatcattcacaagaaatccaccatctttggcatgaagtttagtaaggggaatcattgctgacaaaccccaacctggaatcttttgattaaaccacttagttgcttctgtaaaatcacaaaagcagaattcatctaatcagtaaatttaactatgaacctgtagattatgaaaacaatattcaaaacttggcagaaaacttgaaaactaaaccaaaccccaaaaaaaacacagaaacacgcttcagaaacatataatattccaagtccaaaaacaagcctcacaagacataaaaactgaagattacttaactggtttatctgactaattaattatgttgtaataagggtaagatataattaccgtttcgttttgagattttatcagaatgttgattaacaatagttaaaagataacgtgcatgtctactccatccaggtggcaatgatctaggatcagccacttccagaaacagcgacaaatgatcaccagacttattgaatccctcaggatagacaagaagacgcctacatcaaaaaagaaatccgaaccgtcatcaaaataaaagagaaaatccaaattgtaacattaaaagacaaggtttatcatgtttaccacttgcagccaccaataacgaattgattagaagggacgacccttgattgggaagacgagaagttttgaatcacccatgtgaacttgttatcaacgagatttcccattgaagctcaaactagtagagagcgtgaaaccctagaacctgagtggcaccaccaaccacacatccaaatttgtaaactaaaccccgcctctccatatatgggtttcacttttgcacttcggcccaatttacaatttttggcccattataagatcaacgaccataagaaaagtctaaacactttgtgcatcgtgactaacagtgaaatcatctaactacttcattggctctaccagactggtcactggatgaagccaaggcagtgagatctgtcttgaaataaacaaaaacttgatgaacttaatagatgaagctcaaaactgaaaattgaaagcgtattatacacgtaatcagctctttgccggtgatgatctgtttcttatatacttgatgagccaaaaggcattgctttttcattactagacgcatgcttttacattatcctactgagtcatcattacaaaatgtcgaaatcctactgagtcatcattacaaaaagtggaaacttgattccgacaagggtcactctaccttcctaagttataaggggactctaattacgatatactaaaacgaacagacaaggacacaccatgcagaacccaagtcatcagacaaaatcatccaaagttagagaagctcgggcagccaacacttttgccttctctttttccagcagagcttccctgtctaagcacttctgcttaaattccttcaattcctcctctaattcttgaatccgggtcttaccagtctgctctaccactttcttttcttttacttccttcagcttcttgtccaaccaatccaccttaaagcctgcatcttgcacgtatactagtgcattgtctgcttcatccatatcttcgtctgagagctcctgtggtgactggcacagtgtctcgattaggctgatgaggacattcatgcatgctgtcctcagatgtcggttctttgcattgaatcctaatgcaatgtctgggtatttttttaaaatacggctcacaagtgtcacctgcgattgagaaggaagggtaaaagtaaaacccatatgtatacatatccagaaacacaagggtggggttgactctcaaactcacaaaaagttacattttctctgtatttagaagtgttacaccttttgtcccaaaatcaacgagagtcaaatgataacaatgtctcaagagtttgaaatttccacttacctgtgaaggaagaacttgaaacccattgatatccatggtttccttcacttgttgagtcttgttgactgaatcattagacttcacaccatcatcattcctcttaatctttttaagaggtctgcttccctcttcagaatccttttcagattcctctccacaatcattctcagaatcctttttagattcctcttcagattcatattcatatctctctctagatccctcttcggaatcctttttagattccgcttcagattcatattcaaaactctctctaggtctctcttcgtaatcctttttagataccggttcagattcatattcaaatccccctctagttctctcttcgtagtcctttttagattccgcttcagattcatattcaaatctctctataggtctcttttcgtaatcctcttcagattcatatttatatccctcttcagattcctttttatatacctcttcagattcatattcatatccctctttagatccctcttcagaaatctctattgcagctactttgccaaaaactctataaacgtctatcttgactacaattgtgacttctccacttaccaaaaacccttcttcaccagaaagtttagaatgacgaatcatggttttataaccccaggaaggagtcttctgatcaaaccacaaattttttctatctgaaatttcacgaaacaaacaacactagtcaagcatcacacaatgataaacagaaatacagacacagaatcataaaaatctacacttttttgtccagtgcagtagaaaaactcacatttctgttgggagggcttatacaaattgtgatttacaacttccatgcgcaattctgtgtttatactccatccagaaggcaaatgtttagaatcagcaacttccacatacaaagacatatactttttaatcctatttcccatgggataggctataagacgcctgtaagcaaaacaaatgaatatgtgtcacatgaaaccctagctaaaattcaccggaaaacatcagaaaaaaagacagagtggtttcttaccatttgcagccaccgatcacaaattcgtcagaataaattgccctcactcccaaagaggagaaatccttgattacccaactgaactcgttcttaccaagtggactccctattctccccattgaagactccgtcgcaaccctaaagagtggagagtgtggcacagcacacacaaatccaaccacgcttctctttctgcttttgtgttgctggtcttcatatatgggcttcagcccaatttcggcccaatttaatgccggtttcgttaccgggaacctaattttttccatccttgtgcttgtgcagtagataagaattacgatgtttcgatccgcggcgagtacaataaagtttgttgaaatattttttatcaaagaaactctttaatcggagaaagaacataccaaagaaaacttttgaaataaaagtaacaaagatcctggtttttattcaatcattcatgtgattagataacgccacatatgcttaagtacgtaagaagaaacctaagaacgttacgcttcatgactgatgatgacttctcattcaaacaacatcatcgaaaccaagtcgagcactgtcggaaacagcttcgttttcttcattcttcagttcggtttcaagagcccacaaaacacgcctctgttccacgatcattccatcgagttctctcatcctagccccacgtgcttccattttcttcttcttcacgcaaagctcctccagcctgttcttcagccaatccaacttgaaacctacctctaccagttccaaaagcgtgttctctgcatttcttatttcctcctctgtgagctcctgaggagctaagcaaattatgtcaatgaggtcgaggaggttgttcatgtaagcattcttcaccatttggttctttggacgaatattcgttgcggtttctgggtgtttttcaaagattctcctcacacaatccacctgagaacaagattgttgtaaaaactacaaaccaaacttaatatgatgagaattagattttaaaattttgcttacctctgagtagaaaactcgaaagccattgacctccacggttccatcaccattccacattgttacgatcaaagtttctcgtaatacagagaagctgtacttttagatttggcaaatcaatttttgtgtgtttgaggagtttgttcttgtaactgatatataaatgaagaagatgcatgaatctcaaataagcgtgagctaatcgtaacttaataaaaaaactgtcataattaattgtatgagtgtattaatagcgtcacacatcaagctactcgtttgggtaaagactatatactctgttcagacactcaaagacactttttgatcaagaaacatacaatgcaattaaagagaccaatagagccatctaccacaaaatactttcattgtatatattaggtcttcccaagtcaaaacagagaccagagcgcaaaaaaaacagaaccaaaccacgtccctaggaatataagtcatcaaacaacatcagtgaaaaaaagatcagcagatatggcctccaaaatctctgccttctctttattcagctgagcttttaggacacaaggatcatttcagcttggaatttcacagccacatagtctcacagctgatgttaaagtgttgaatttctaaaaagttaagcgagatttgcatctttctcaagtattcttacctgtgaaggaagaacttgaaacccattgacatccaccaaatctcctggaatttccttaagctaatcacgagacaccgaaccatcatcattctgcattatctttttaagaggtacatctagttttccaataacttgaagaacatcgacctcaacaataatcttgagttcatcgttcacaagtctggtaaccagtgtcgtgttactgagaaagatagaactctagtcaaaacaacgtattacggagcagcacaagtcccacgactaaatgagaacaaaagttatggaaagaatcacctttcgctagtgaggatttctgacaaaattgttttactagtgttatcaattctacgtgccttccccatccagaaggcaaggatttaaaatcagcaacttcaagataaataagtatttagcttcacatgctgaagcagagcagagggctctttcttattaacgaacagagactagaacacaaaaacaaacaaacagaaccaaaacatcaagtccctaagaacacgagtaatcaaataacatcactgaaagatagatcaggagccgacgcattcttaatctctaacttctccttttccagcagtttacttacgtttgtgtgcttattcatcaagtcgtgcagctctttctccatttcagtcactcgctcacatttcttcttgatttctttgacttcatcaagtttcttctccaaccaatccaacttaaaccctagatttttcatgtatgccagagcaccttctgcatcagacagatcatgtgtggagtgttcctgagcccctttgtagagcaacttgattaggctaaagatgacatttatgtatgatgctctcagttcttggttcttcgtacagcattctaatgcagtctccgggtgtttttcaaagatgcgattcacaatacccaactgcgagtaaaaatagatgaataaagtatatagtgagtttaacttttaaagtagagatgttattttcattttctgtatttagaagtgtttaactttaaccataagtaatctctagaagaagaatgccaagtctgcagattttctttgtttcttacctgtgaaggaagaacttgaaaccccttgacattcaccaaacctgccttgtcatcatcattgagctctttgttttcgacaagtgtcgttgccatcccatcccaacattgcatttccatgttatagtccttcgatacatgaaatctgcgatcagtttcaagaacagttatctgggcaacaatttcgacttctccatccaccagaaacccactttttttgtccgtaagttcactaaggtgaaacaaggatccacccttgcttcgttccttcttattaaaacagtgttttagtcctgtaaaaagtcatcacaaagcatatataaaactgtctttaaaacaagcattaattatctaatagaatcttgcagcgcaagtaagtaatcactaatcacctatctgtcttgagagtttcttcgagaaaaaatttacgacagtaaaggaaaccttcacgacctttctccattcagaaggcaagaattcacaatcaacaagttccagatccagacaaaggaattgatgaccatctcgtttcttggaataggccagaatatgcctgcaagcaaaaaccatacaatgaaacaatggatgacctcgcaaacctatattgaaataaaacgttagataactcttgttgtcttcttaccatttgttgccaccaatcaagaattgatctgaataaatgggcttggggctcacagaacaaaaattcttaatcacccaagtgaacttgttatcgactggattccccattaatgaagactccttgcaatcaaactacctgaatatgaaagatgagaaattaaagaaatatattctgccatagtttttataacaaaatctagtgatcctaaaaatagtgtttgattgattcgtataccggggtcatttgattgtttcaattcactaacaaaatctagtcaataacaaacgactaaatataggctaaaaatagtattacttgattatttttagtgcattcgcttgacttataaaaagattctaaatttctacgttgatacagtctacttatgtagtaggattcgtggtttcgattgtaacatgaaaaatcaatcgattagagatttttaattacagtttaccgttttccgttcttcccaccattctgcgtccatctggattactctcgtaaatggatgataaaaacatcctgtttttttttgcgtattttaaggtatacagaatacttatcttgaatgattgttaaacgattattatggctaatttttttttcagaaaactgttttgatttttttttttaattcattttgttagatgaaaactgttagtgttgtgttgactgggtttttttacaataatttattaacttatcaaaaatcaacaaatttattaatgatgaagcctcgtgaatttaaatacttttcaatattattatgaattaataaatgatacgaccaatggaataatattggaatccaattcgtttagctccaactcttcatttgcctaagatatttaactttttttttcattaagcaactcaattaatgctttaaagacaccttgagagccctagtaacatgaagtctctttaattatgttcttaactttaaaagggaaagcaagagagcaggccaaacaaacaaccctatctcactagcagaacctaaatctaattgcccaagaactcaaaaaaagtcatcaaatacaccgtcatcagacgacccgagtggagctatggcagccaaaacatctgccttttccttcaccaactgagcttcgaggtctgaacacttccacttcactttatccaactgagcttcgaggtctgaacacttcagcttcaaatccttcaactcttccccaatttcatgcatccgagtctcaccagctgcctctttctccttcttttgtgtcacttgatcaagtttcttcttcaaccaatccaacttaaatccatgatcagtcaaggattccaatgcaacatatgcatcggccaaatcattcttggagatttctttaggtgaccggcgcacagtctcaatcaggcagagtaacacattcatgtatcctgtcttcagatattggttctttatacggaattttgttgcaatgtctgggtgtatttcaaacaaactcttcacatatttcgcctgtgatcagtgaaataaaatggacgtaagaagtaaaaccagatcagagagcaatcttgggagactaagaaacagaccaaaaaacaatgtcttataatccaaaaactaaagttaagtgagtgattcttatggttttgtgtttaaaactatctttcttacttgggaaggtagaacatgaaacccgttgacatccatgctttctgattctgacacatttaataggccaataacttcaagaacctctatttcaacaactattttgagttcgcccttcaccagaaatccactatcttcggccttgagttcaataagaggaaccaggtttgtgaagccccaatctgatactttctcacaaaaccagtgtattgtttctgaacaaaatagaatacaaaacagatctcatctcattacatagaactagaatctcgcagcacccaaactcccacaaaatatatctactaataagcaataatatatattgtggctagcatgaaaatactcacctttacgttgagagcatttttctggaatgtgatttactatagtaaaggaaaactgtgcgtgtcttctccatccacaaggcaatgattcagactcagcaacgtcaagatatagagacaaatgatcagatttagtatcatttcccttgggaaaggccaaaagacgcctgtaagcaaaatcaatagaaaacaatcagcaaaacgaaagagaattttttttcaaaaatagcaaaaaaaacaatatcgccgtatttatcacgtaaacctaaatttggacgaataatattaaaagacaaattgtcttaattcttagtttcttaccatctgcagccgtcaatcacgaactgatcagagtatattttctcagattgcaaagaggagaaattcttaatgacccaactgaatttcttcttatcagcttgatcattccccattgatcctctcatgttgactcctagctactcctacacacctgaataaataaatcgaaatatcagacaacaatctcgacaaacaaaactaaattaacgattaagattttactaaggaatagaattgtcagcatattattttttccctacaatgtttatagatcaatgggtaattaaggatttaattaccacgaggaatacgagtcgttaaaggctcctagggatttactgttggtcaacatatatatacatttacaccgaaaccatccttaaaaaaggagtcaaggaaaggttctattaatccggaattgccgataaattaatccaattgttaataggtttgttaaagcaattaattttttgatttatcctttaatgaataaccgttttaacaatattgtatcttgtttttaagcaagttcgatttatcagttatttgtttaatttcggttgaatcttatgtgatttttttttgtcgttcattgatgtacgaatgagtcatgtatgaacgaaatgattccaaaatgaaatatttcaggatatttttataaaacaaaaactaatatttcgatttctaatagccatgtggaaaagggaagttgagaatcaactaaagaatctgcggtcgattttcatttaaaacaatatcactgaaatcaagtggagcacgagcagccatagccacttcttcctcattcttcagttcgttctcataatacaacaaaacaaacttttgtttctgcacattttcttggagttgtctgatccgagcgctactttcatgctcttgcttcttctttacgtaaacttaataaatagttgggcccttaaccagtatctaaaagtatgtaaatccttttcataacaaaatttgcattataggggttataatgtaaacccaagtaaatttgtttttcctgaaagtcccaacacaatattttcaaaaagagcacttaactttccctaaattatgtgaatacaatgaccgtgaccattaaagaatgatattatgcgtatcattgtttctccattcccaattagaacaaagtaatgtgagttccgaatctctgtataaatttctatttacagattttcaatattttttcactaattctgaaaataatagtgacctatttgttagatcgcatattctaagttaatgagaacaaattaaagtaaaagaaatgtccagcaaaggatatagcctatatcatatagaaatgcagggcaactgaattaggtgatttgtgtggacaaaattttctttcctccttggttaaattctcttttgctttcgtatcaagtaacctagctattttcaacatacagtatatatattttcaatttatttctctattgaacaaaagagtggagaagtcgaatagttgatcacaaaactcaataatgaaaagatgcacacttgcaaaacgtcgtaaataaccaagaagcaagatcaacacttgtttggccacaactcttcgtgttctaacacctagagcttatcaaaaacccgagatgaggatgaagcaaacttatcaaaatagaaaacctgatatcagaagtccatagagaaatagaagagatccaacaaagccttgcatcattgacgagatttatattgaaatgaacaacatcatgatgagggtgtacattaccgctcgtaagatccacttaaggtcatcatcgttaacgttattaaaaaacaagaaaggagctttggcggccaaaacacctgtcttctccttcttcaaaagagcttcaaggcttgagcacttctgcctcaaatctttgagctcttcctcaatgttttgcatccgaatcttatcagcttcttccttcttcttttcaaacaactcatcaagttttttctccaaccaatccagcttaaatcctacacttttcatgtaggccagagtagttttcgcatcagacagatcatcctcggagatttccataggcgattggtgcagagtctcggccaagcagagtaggacattcatgtacgctgtcttcaaagattggttctttatactgaactttgatgcaatgtctgggtgactctcaaacaaacggttcacagatttcacctgcgaagtacgatttaaattaaagatcgaatatcaaactttaaagacttgcaaaccatatcttatgcagtgggtaaaagtaatcacgttttcatctttcttaaatttcttaattacctgtgaaggaagaactttaaaccctttgatatccatgctctcagacatctctggtgcatctaatgaaccaacaacttcaataacatctaccgcaacagcaaccatgacttcgtcgttcaccaggaatccaccatatttgtcagaaacatctttaaggtttagcattggtggaaaaccccatccaggagcgttctcatcaaaccacgcttgtgtttctagaaaaaccacaaaaaagatttcacctcataagtttaataaaccagtgcattgaacgtgaggttcacaacttgacaggacaaaacataaaccacccaaactggagtccagacaagcatagcacaacatacaatttgaatattaaactatcaaactttatttacatgcagctagaggaactagtaaccttgcacttgggagagtccttctgaaagttgattaactatagttagggaaaactttgcatgccttttccatccagaaggcaaagactcacaacaatcaggaacgcccagatacacagacaaagacaagtaaccatcggcatcgttaacttctggataggcaataagacgcctgcaagccaaaaaagaaaagaccaaaaactcagcaataatatcaacttcacatagatagaagaaaacaggaggattctcttcttcttaccacttgcagccaccaacaacgaaaattttagaacgaacttcaagaccttgcagagtggagagattcttaatcacccaagtgaacgtgttatttatttgctttcccattgatctagatgaagagtcttggcaatcaagctaccagaacattaacctcaaagtattaagtcaaacaatctcgagctacgaaaccgaaacagagattacgattacactgtcaaaatcaagcctttaaaagttagaacatcacactaacaatggataagtgtttacccccttagagtacaaaagtgcagatttagcctaaacgcatccaaatttgactgcgaatggcttttcctcctcctagggttttatcttagcagcttttaggtcattctattaatccacgtattaatagctttggtttagctatcaatttttttatttttcttggttggataattgtttgattttattttaataattttctggtctaataattaatcgattaacaatcaaattatctctattttttgttttttggtttcctacaattttggttcaatccctgcccgttgtagacctcgtttgcagtaccgtcacactcctctagtcctcttcatacgtataattaccatgaacagaacccagtatatattttgatactttaaccccaaagatttggtaatggtaattgttaggtaattttacatatttagaaatagtcaaattcaatgataaagtgattttttttgtgttacttgatccatatgtgaacgttacccatctgtttagttagaaaagagaaggaaaaaatgatccttactcaaaagaaacacacctaaacgaaacaaccaaaaaatctgactaatagtcttagaaccacaatacttctttacaagaaacacactggattaaagaaacctaacgagtcaagagccacaaaatgcggaaacatccaacctaagccacttatcttgcagagtttcaagaggactaaaacaccaaacagaactataagaaggaatctgaatactgaagccattaaacaatatcatcgaaggagaaaggagctctggccacagacacatctgctttctccttctccagctgagcttccaggtttgagcacttcagctttaattccttcaactcttcttcaatttcatgcacccgagtctcaccagcttcctcgttctccttcttttctgacacttcttccagtttctcctccaaccaatttagattcaaccccgcatccgtcaagtatgcaagagcagcatctgcgtctgacagatcatccttggaaagttcctgagtcgactggcacatagtcttgattaggctgagaaggacgttcatgtaagctgacctcagatgctgattctttggaccgaactctgatgctatgtcggggtgtctttcaaatatacagctcacagtttccacctgaaagtgatagaaagatgaattaagtagaaaaaaacaaattgaggaggcagttatcagagacttgaataaatcagaacagacaaaaacatctccaatattccagtttcgctcatattctgcaaatcatagatacatcatacatgtatcaagaaacttttacaatttcatttcttgtttttactgaatatacaagtgtgctctctgctacttgagaaacaattcacaaaacagaatagaacatatgtcggttagatattttaagaaacaactacaccattcttgatttcatacctgtgaaggaagaactcgaaagccattaacatccatgctttcctttactgatgaagcttccttgagcgaatcattagactctgcaccatcgttttcgtctaccttgcttagagctttagttgtctcttcagattcctctggtacgtcattttcctctagctcgcttagagctttggtggttgtctcttcagattccactggtacgtctaatttgccaataacttcaagaacagaaacatcgacaacaatcttgagctctccattaaccaggaatccaccatctttgtcatgaagttttttaagggaaagcattgatgtaaaaccccagtcactagtactcgcatcaaaccaattttttgtttctgtaacaacaacgaaataaattccatttcatcattgacttcacttcacataaaataaagccatccatgaaccatgctctaaacttgctacgaaacattgacactagtcttaaaccaaccaactcaaacaacataaggaaaaaaaaaactgttgcaatcaatttccaacgcatatcaagtaacgagcattgtgtagaaaaacaatcacctctagcttgagagagttcatcagagagttgattcactacactgaagtggaaatatgcgtgtcttctccatccatcaggtaaaaattcactaccagcaacggccagatacagtgacaacttctcaacaccatttcctttaggaaaggccagaagacgccttcaagaaaatttagtcaatcctcaatttcacggaaaacaaaaaaaaaactaaattgatgaaatcattcgaaaaaattcacttcttaccatttgcagccatcgacgaagaattcatcagaataatttttcctggactgctgagaggagaaattcttaatcacccaagtgaacttgttatcaacttctttccccattgttatctgcaatcaagctaccagtagtacgatgacactcttaaacatcaattttaacagataacaataatcaacgtaacgaacaggagattacgaaatcattaagagtaatatgatcagttgttaaagatttcacctttttagacgaagacagaatgagagaaaaagctctaaaggaaacttctttgatacgacgaacaccgaccgacctgacttcactgatggtatcattcaagtcatagagttgggccaaagagcccggcccagttgaaaaatgtttaagcgttcacgttctgttataccacacgttgtccaataagcagagcactaaacggcacgcggtgtgtatttgagagaagttagaaacggcatcaacaatgaaaactcgactaacctttgcttgttatttggtcaaattcaacttgtagcatttgccatcgacttaaaacttttaaataaaatattttaaaattaatatatgcaagttctacaagttgattttgaccactacatgttggtctacagagaaatgaaactatgaattttaatatcctttcttggaatgaaaggttccttttcgtactcaaatttatattataaaattttgattcaacagtttcatcataatcacttactctctgctttaattttaatttcgtattcaaaaccgcaggtggatgaagacaaattagcagagaccaaaacgtagttgaggatgaaacaattacttagcagaaaatgaacagaaacagaggagtcttacttattcaccaagaaactcttatatcacttaattttctcaagttaaaaataggatatgtatatgttttttaactctacctaaaaggaagatactgaaatgaggaaagctgaaataaaaagactagaagtaggaaacactattcctcattaaacaatggagaagactcaaatcaagaaatcacaacttcatcttaaaatctcagtcaaacaacatcaatgaagccgaagctgcagctttctctttctccaggtcggcttcaagttctgtcactgccagctttcgcttcttgacctgtttctcgagttctccgatccgtgtgtcgtaagctatctgtttttccaaagcctgatcaaacttctgacgcaaccagtccaagttcaagcctgctttaatcagatccgtaatcgtattgtctgcttcgttcatgtcttccactgtgagttccttagtagatttggacagtgtcttcgtaaggtcaagaagagcatgcatgtaagcattcctgatatgttgattcttcaaactgaaattcgatatgagatctggatgtttctcaaagattgcattgacctgatcaacctgtgatgataatgaagaacaaaaatgtcaaatcgagttctatctcaaatattgaaacaaaagagcttattaattacctgcgaatcaagaacctgaaagccgttgacttcgatagttacattatctttgttctgcaaatcttcagaggaatcatcactaagctcttcaacttgtgatgcatttaacgtgtcaataaattcatgaacttcaacttcagcaataatcgtgatctccccattcaacaagaacccaacatttacgttattaaggatgactgcgggaatcatgtctttaaacccccaattcttagtgttctcatcaaaccagcgccatccttctgtaacaatatttaaacatataacaagaatatgttactccgatccatcaatagttatttgacatagccagtcatgatcacaattcacaaaccatagtgcataggattatacttttatctacagaatgtatcggagatatatgattgactatagtcatgcgaaattccacgtatcttctccagccacatggaattagttccatattaacttcgagaaacagagaaaagtaaccgttttcattgggaagagcaacaagacgcctgcaagaaagaaagaataaccaaatacggtatatgggatcattcatgatttgatatatacgatcacgttttgacgataaagatttgaaagataacaaaagaaactatgcttttaccaataagagtcaccaattaggattggaacagagcaacgcctatgagtttgcaagtcttttatcacccaaccaaacgtcttcttcttaaaaccaccttgatttgccattgaagactctactagatacaataaaagaagaaaacccttttaagagcctcgaattcaaaaccctaatcacacgcactgagatgaagaagctttctctatacggaagacgaaatcgaggtttacaaattgcatctactgtggatagatgttgcttatatttttatccggttttttaaggtcagcggttaaatcgttgaaccggattgctagactagcttgctgcgtaggtatctacatatgctttgaacttaaaccggttcaaccctcttgaggttcagcaaaccggctcaatcctcttgaggttcagcaaaccggctcaatcaataataatggtttttgcaaagccatgtatatttgagaaaggttttttttcctacttgagaaaggataatgtcaccgcaaaatgtgtttaaaatttcaagtgatgttatttttacccgatttttaatttggagttgaaatatatctacgattacgtacgtatgggagttattatattcacatactctttatataacaaaagattaattaaattaagttatcagtttgtttattttctactgtcgtcaaaaatatacaaatccaagagagagagtgattaggagccaatatatcagcttcgttcacctagcgtaaccccaagggtgtaaccatgaaaaacacaatgtaaaagcaaagcgcaatgataatccagtcggagacattacttagttgagaaagttcggacctaatacttttaatcttacaagtgcattagcctgcgtcacaagctatttgtttctccaacgccctattcaacttcagacgcaaccaatccaacatgaagcctgcatttgtcagatcagaaagcgtactgtcggcgaagtttaagtcttcctcagtgagttccttaggcaacttgctcaatgtcttgattaagtcaagaagaaaacccatgtaaacattcttgagattttgattctttaaaaccaaattcgttgcgagatctggatgtttctcaaagatttccttcacttgattaacctgtgaagatagtgtaaacaaaggtcatatcagtttgtgtcaaatatggaaacaagagttaaaatcattgttaagcttttttacttgcgaatcaagaacatgaaagcccttgactacaacagttacatcatccttgtcctcttcagatgaagagtaatagccaagaagtgtccattcactatcatcacgaaccgctgcaacttgtgatgtgctaacagcttcaaaagtttctacttcagcaacaatcatgagctctccgttcaccacgaacccactatttatatcattaagttttgttagagatatcatctcttcccaaccccattccggagctttcttatcaaaccactttcgtccttctgcaacatttcgactccattaattggttaatcaacatagaatagtcaaatcactactacatcaactaaaatcctgcctgtggattaatggaacatcaaattgctactatcaaaatgacatagtgatgaaaagtattcacttattcaattttaaaacgtgtttcctttgtttctaccatgcatgaaactaatcaaaagctagaaatatttacctctctttacggatgaatgctctgaaatttgatttactaccgtaaaacgaaattgtgtatattgtctccatccacaaggcaatgattcgaaatcaacttccagatacagagacaagtgatcaccattattttttttgaataacaagtgatcaccattacttccctccggataggcaaaaagacgcctgccagaaacaaaaaaaaagatgaacaacccaaatgaaaagaatcaccaaaactttatagttatatacacatatgtctaatataacattatttaaaatgaaagagaacatttggaatggaaagaaaaagatattgtgtttttaccaattgacgtcatggatcagaaccggatcagaaacataacaatcttgtaattgcaaagaggaaaaattctttataacccaaacaaacttcttatcacatgggttcatgattgatgtcatgaaagattcctcgttcgcaaggaaacaaaactcctttaaaactcaaattttgtaaaccaaaccctaatcactttcaaggtataaaatagaagaaaaaattataaactaagattccactccaagaaattttgaaaatcgagcagaattctttaaaaagttaccacgatatgaattggaatagagactaaagggttttatagaaaaggaacggagactacgaaaacaaactttttaagcgtaacctaacgtaaaatcatatataaaggaaaatatatctagctttttttttggtaacagatattgttagataaactttagacattttccaacaaaataaattcatctatagattttcttagcgtataagtaagaaataaatctttaaacccttaaatataggagatttattcgagcataaaattcgaataaagattcttaaatataggagatttattctcatctaaggaaggagttaataaaattttagatcaaagtggctaagttaaataaaatgaccttgatttttgtatagattaacaatcttttaacaataacattatgcttacatagcgccgtaacgtatgtcaaattaaagcatgtattgactttccaatcaccctgtttcttcttattacgtttatttggctcaaatactctgtttctgatttgttatgtgaaagatggtagatattttatacttgatttcgacgtagccactttctctctaaagaagacaatctttatcaaggaatgtttttcaaacaaaaacagaggaacttcttctaaaaccatcaattagtgataaggagagttaattgacaaaaaaaaaaaaaaagtgataaggagagttaaaacagaacaagaaaccgaggaacttcacataaaaccatcaattagtgatatcaaacaacatcgctgaaatcaaacggagtttcagctgccaaagccgcagctttctgtttcttcagatcagattctagatccgacaaattgagctttcgcttcttgacttgttcctcaagttctctgatccgtgccccaatgtcccgttttttctccttcttcaagaaagcttcgtccagtttctgacgcaaccattgcaacttcaagccagcttttgtcagatccaaaaccgtgcggtctgctttgtttagatcgtccattgtgagctccttaggcggtcggcacagtgtcataattaggtcaagaagaacacccatgtaagcatttttgagctgttggttctttaaattgaagtccgatgcaatgtctggatgtttttcaaagattgcattcacttggcttacctgtggaacaagaaaggtcaaacacttttcttaaactaaaattgaaataagagttttaaaatcaatatcatgctttattacctgtgaatcaagaatctgaaacccattgacttcaacaatttcatgagcatcttctgacgactcctccgaccattcttcagatgaagacgagtatctctgttcatcatcgctagattcactaccctctgtgttcctcgccattgattacgaagagaatatctcaatttcaaaactggagatagatgtctgaggattaattaccctaagtgttgttgtagctaggaatgttgaccagagaggatatttatatttgtggagttaagagaatgatattaaggaatgcatgcattttactcgccataagttaaaaatggtaaaaaaaattaaacaaccaatcaatattaatgttgtacatccaatcgagccacatttctgccgtgtgtcacacttacagacattagtacttttacagcaagaaacttaattcaagtaacctagcggagagtaatcaaccatccccaaaaaaactctatacaaaatgagtatacataagatataagtctatacacaaaatcaaacatagccgaattcatatgcatttataatttaatggaattcaatgtttaagaaagtgaaatttgatttattaaacaaaaatacatgtgcgtaaatcttaaaacgttgtccataaatgtacaagtcttcaaatttatgtgcccgtttacagctataaatgttcatttcttggacttcctgctgttacttatatatatggtcaccaatcaacctcttttactatatatataaatggggctctcaggttgacaaacaaacaaaatttggagatctcatcgaacagtgtcaagaaaagggtaaatctcatatctaaagttacaactcccactcaaaactctccctccttctttaccatcacaacatttaggaagctcccctataatcttatccaaacacgtcttacaaaccgtaaaccataaatcccgtctacactgcaccattccgtaaagcttcatcttcccgagtttcatctcccctgtctcgtacaacaataacttatctgatctgcgagtagcctttgcggtcagctcagtgagtagagcctttgtcttcacattgaacaacgctggatcgcttactttctttgtgctgtacatatagaacttgttcttgtcatcgatcttctcgaagaaagcggttggagaaatcttgagaagacatttatcaaaccatactattcccgccttgttcataggacatcttctacgcagctttcatattcatatacataacgataccacaatcaaaaacaaatattacactcgtacacactaatctatgtacgatatatagttttttttttacaagtgctaaatgactaccaatatttatcaattataagctcagtcgagatattgtctcatttttggaaaagtaaaagattgtgttatctttaaaaaaaagtattgacgtgtgtgtgacgttacctcggaggtggcagtggagaggcaggaaccacacttggagccgtaggagtcaccccggcactggagcaagatgtagacggtattgggatcgtcaccatgataggcatagacaaaacctcttacaaaagtgtctttatacatgtcattggtgagaaagttgaggtttccttcgtacgggctcttggacttgtatttcccttcagcctcggagcatttgtggtatagatatgagttggtctcgttcatggacgaaacactgcgtataaagaagacttgtatggctaccatggccaagttaaggaccaaagcgatgcgttttggtatgaaggatgaagacattgtttttgattctcgatcttcctttcttacgcagaagaatgctttattgtaaattgggtgaaatggttatgtcaaaacgacttttttggtgtatttaccttacaaaaattcggttgatttagaagagctgcttttttgtttggttctgtaacggacacgagagaaatgttaggagttgtgtgacttggtataagcggtgagtgaagggccgatgaaaaagtcaaaatttaaaggtttgactgagttaaaacttttataaattactagtactgtgacatcggtatataaagattttggacctgtgtttttccagtattaacatacgataaattgcatctcattactgtttaatcaaatgaacaagaatggtttgttcttgccattacatagacagagtttgactttggtaactaaatacctgttaagcatttggatatctctttatgaaatgcaaaaataagattgccaaacattgaggtttcatcgttaagctgtttcagtcccactacttagcacctagatcaggattttgcaaatcagtaaaaaatatctttgaacgatagaggagctcttgcagccaacaccttctctttttccttctgcatctgagattcaagatccaagaccatgtgcttcagcttctgcaactgttcttccattgtttctagccggaccacactactctcccccaacttcttcttttcagagacatcattcagcttcgtcttcagccaatccaatttaaagccaacatcaatcagatcgacaagtgtctcatcagcattactcagatcatcatcagagagcttatctggagactggcacaatgtctcaatgagactaagaagtgcatccatgtatgcttttctgatctgttggttcttaggacggaaacctattgctgtgtccgggtgtcttttgaagatttggctcactgattgtacctgcaagcaagaacaacataaactacatgagaaccaagattttaaggttaaaatctgaaaacaagttaagttagtttgtgttcttacttgtgaagcaagaacctgaaaaccattgacatcaatggtttccagaaaatcactaatccaccacgactcataaaaagattccttattgttacactctgtaccaaaattttctactgtcttcgaggtgtacaccatggacttccattggtggagagatgaagcatcatcatcatccggatactcttcaactgtaccatcctcaaacagatcttctttcgcggtatcatcagtatccgcttcggaaactatgacattgttacatttcataccacgatttcctactgaacgaaaagctttattccatgcattcaattggttcaaaggacatatttcctgaccttcatcatcagaaacaggagatgaatcatcatcatcatcatcatcatcatcatcatcatcatcatcatcatccaaatcttcttcaaatgcatcatcatcatcatcatctaaactctcttcagattcatcatcatcatctaaaacctcttcagatgcatcagtatcatctaaaccctcttcagatgcatcatcatcatcatcattatcatccaaatcttcttcagatgaatcatcataatcatccaaatcttcttcagaagcatcagtagctggatctccttctttccagcacagaggttcagttatcttcacagtatcctttggtacatcaataactggaagaatctgtacctcagcgacaataatgagtctatctctcacgagaaatccattgcctctagcatctgtaccttaccaattgcagtcagaggctacgaaggtgcgagagtagcaattgttatgttgcaatgaacagaagtttttcaaaacccaactgaatcttgtctccttttgcttgctcattattcttgatgaaacggttgaaagtggcggagcacaatagagaatcactgaatcggaaaagcaatagaaactggatctacctcttgaaagtttgttagcgagtctagggtttacggttggtggatagagttgtagaagaatatattttttagctttttaagataaagatcatatagaaagtaaataaattaatagatcaaaataaataaatagataaagaccatattcaatataaataaattgactttattaactaattaagatgcttagattattcataaaaaaaatacgaattcaaaatataacaagtcaaacccttttaacttatttgatacttgattcacaagtatccaagataaaaccttaaaagtctgtaacggaaaggaaattgcaaacttcatttattcaaccttgacaagtgtcactctaacgggcaacctcaaaccattctttttttcaattgagccatggacagttgatttgctttctcttttttaaggtcggattccaaatcggacaaagtaagctttcgcttattgacctgttcctcgagttctctgatccggacaccactaattctctgtttctctttcttcaagtaagcttcatccaacttctgacgcaaccaacccactttcaaacctgctttcgtaagatcaaaaagcgtactctctgctttatctaggtcttccatggaaagtgcctttgtcgactgggacaatgtctcacttatgtcgacgaggacatccatgtaagcattcttaagttgttgattctttaaatcaaagtttgaagtcagatctggatgtttttttaacatttgactgaccaaattttcctgtgatcaagtaaaatgtaaaccaaaaatggtcaagtatagtcgaattatcttaaaattaaagagatgataaataaatttttgttcgagcacatagaattggattatttagtacttacttgtgaaggaagaacatgaaacccattgacttcaacagtttcttcatcttccgacgaatcttgagaaggagaaaaatcaccatcgtcactgtcgttagcctcgcaactattttccttcaacattattcgatgagaatctctcagcttacaaaccgcagtgttggtacaaataagaagaagccagaggatcacaaaatgggtgttgaaacgtcgccacaacagaatatatatatatatatatatataaagaaaatgcaggcattcttaattagtaacatatttatgaaccttgactcatcgtgacttgatattcttttggcataactacgaataaactaatattggtaaccagcgaatagatggaattaaattgtatccatcaacttgatccgcttgtttggtagcgactcttcgtgtgtcaaactatattcatttatcagggaaaaaacaaaaactgtcttcgtacacaaagacattactttttcatcaaggcagtgggggaaaaattgacagaaacaaggtattgcccctataactttgtttttgggcaataaaaaacccctaaaactgaatcattcctatgataaaatctcctacaaattgttcattcattggcgcaatcgatatgcaagtcatcctggggaatttgttttgactatatattgattacatattctatgatcaatcctttacagaaatcaatagattttacgttttattaatgcattgtggatatttccaagacattggtaccttttatcttcctaagttttaagaggattcattagcaagaacaaaccacaacaccaagtagacccaactccaagtgtcttaagaacactaggacattaaacaatatcaccaaaaaatcatttgcacatcgctcttttgtgcaaattaacttcgaatcatagcaaatttgttaagtagtaaataatactaaacctaaagtatgtaagatctgaaccaaaccaaaactaatacaaatcaaattagttcgaccagtgttaaattatctcaaatcaaactaaactgatactgaaccaaactcgattcttaaccagaatttgacctaaccagactttaaaagggtttaagccggctgatattttgagtttagccggtttagaacggtcaatgtgagtctaaagaaattaaaacagatttccggtttacggtgacaccggtttatcaaacaacatcatcgaactttagaggagctccaacggacagaacctctgacttcttcttctcacacttgtgcatcaattcatgaagttgttgctctattccttggagtatgatcaaaccagactgttctttctccttcttttctttcacatggtccagcttcttctctaaccaatccaccttaaatcccgcatctttcaagtatgtcaacgcaatgtctacttccacaagatcttcatttgagagctcctggagagattggcacatcgtctcaattacgttgacaaggaaattcatgaatgttttcctcagatgttggttctttacttggaatcctactgcaatgtctggatgttttttaaaaatacgtctcacagattctacctgcaagtgtaagtacaaatatacaaagcatatcagcgagaacattctttggagatctggatacatatgatcttgaggtcattcttaagtttctttacctgtgaaggaagaacttgaaacccattaacatcaatgctttccttcacttgttgagccacctcttgagtcttgttgattaaatcattaggctgaataatttccttcacttgttgagccacctcttgagtcttgttgattaaatcactagacttaataatttcctctgattcatctagtgtgccaataacttcaagaaattctacttcagcaacaatcatgacttgtccatttaccaaaaatccaccatctttggcattaagttcggtaagtagaagcatgttttcaaaaccccatccgggagcattctgatcaaaccagcgctgcgtttctgtaacaattcatactcattacttaatcaaccacaaataaagctctgatgaactatatgcgccgtaagagtaagatttaaacaacccaactacacacaaacataatcaaaatgaccttaaaaaaaacgaatcaactagtaatgagcaaacttaagtaagaatgaccttgttgtacagagagttcttgcgaaagctgatttactatacatgcacgaaatttgacgtatcttctccatccagaaggcaatgatttaaaatcagcaacttctaaatacaaagaaaggtaatctgctttatatcccttaggaaaggcaacaagacgcctgcaagaaaacccaaagaaaaagaattgtcaaactcgatatcacctaagccgactagcaaacatgaacacgaggtactttttttttaccatttgcagtcaccaatcacgactggaacagaatgacatctctcagagttcaaagaggagaaattctttatctcccaacaaaacttcttatcaactgccttcgccattggattttgttgtaatcaaactaacctacacctggagaaagagaaaacctcttttaactgaatgtcacacacatgtatatatattcagaaaaccaattgaccccaacgaaaacacactcgcgagaaacaaaataagaccaataaaaaaacctaagcatatgaagtaggaattccttgcgattgaactacatgcaagaatatgaagtgaattgcacacacaaatttgtaaaccaaacaaatcaatcaatcatcatgtgataaattaaatctcgatgaacaaaaaccaacatacatctcaaataatcaccataaactcgaacaaagaggagagaataaaaaactgaaggaaatctagtagtggatttaccttttgaaagttgaaagtttgttagcgagtcgctagctagggtttatagctttactcttttgtaccgcgatggcgcgatatatatgggagatcagttaagataaggactgcgcgtttacgcgttccaaaaaataaatacataaaatagattcgttaaatcaaaacttggattaaataattaagatgcgtagataattctgataaagtagtacgcacgcattttcaaaataaaacttgcaaaaaccttaagagtaaagcgttaagacttatttgatacttgattcacaagtaacgacgagagaaacctaaaatctccaacacaaggaaggtgctgaaataaggaatggagaagtaaaaagactaatgatttatgattcatgcattcaaacaacatccctgaaactaattcgaactttagaagccaaagcggcagctttctctttcttaagttcggattccaaatcagacaaagccagctttcgcttcttgatctgttcctcgagttctttgatcctgggaccactaactctctgttactccttcttcaagtaagcctgaagcaacttctgacgcaaccaaaccactttcaagcctgctctagtaagaccaaaaagcgtattcgatatgcaagtcattatgttgaatttgttttgagtaatatagattctatactctctatatatgatcaactctttacagaaatcaagagagttacattttacaacattgtggatatatacaacacagggtctcttttatcttcctaagttttaagaggactcattagcaagaacatcccacaacaccaagtaaaaccaaactccaagtgtcttaaaaacacaagaagcatcaaacaatatcatcgaatgagataggagcttttgcagtcgacacttttgccttctccttctcaaccagagcttccatttctaaacacttctgcttcatgtccttcaactcttcctccatttcttgcagcccagtctcactagcctcctcattctccttcttttctgacacttcataaagtttcttctccaaccaatccagtttaaatccagcatctctcatggatcccagtgcatcgtaagcatccaacagatcatcctttgacatttgctgaggtaactggctcagagtctcaatcagactgagtagtagactcatgtaacctgtcctgagatttgggttctttggacgtaaatcagatgcaagctctgggtgttttgcaaacatacgactcacagattttgcctgtgagtgaaaaaggtgaaaatgaagtagaatgcatatccaaatagaagttcccggagacaccacaaaagcaccatatcatagaacaaacacatcgtgttttctctcgtggataaaatttctacacaaaatgatgttattttcttacttgtgaaggaaggagttgaaagccattaacatccacagtttccgtgattgttgaagtttcctctgtcacatctaatttgccaatagtttcaagaactttgatctcgacaacaatcttaagttccccgtttaacagaaatccgctatctttggcatgaatttcatttaggggacacatggatgaaagaccccagttggtagtcttctcatcaaaccactgttctagttctgtaaaatcaatcacacacaaaaaaaaataataataaaaaaaattagagaggaactcttgcaaagctagcagtggtaataagttcttaccattaagttttgactgagagagtttatctgataattgatttactagagttagacgaaatttagtgtgtcttctccatccagaaggcagagaagtaggaacagcaacaccaagaaacaaggacaaagaattagcattattatatcccttgggataggcccgtagatgcctgaacaaaaataaaagaaaacaaaagatatcaaggaaacctaaaatagactaaaaacataagaaaaattcttaccatttgcagccaccaacgacaaaatgatcagaataaatgaggtcagatagcaaagaggcgaaatttttaattgtccaagtgatcttcttatcgaattgcttccccattgatacttggtgaagcttcctctgcaatcaaactaacagaacatttaaaaaattaaaaagcaaatcaaagaaaaaactagcacaacatgaagagaagaaaacccttggaatccaagctgagatctcaactaacaatatcaagcagcatatctatatatatggtttcgaagcctcaaaagtttgatgatttgttaatcatttagattacgtacatgagggatacgaatcgcttgcggatcctcttagggttacttggagcatgggcaacctagattctgtctttggggaaaagggataacttttgaacgaatcttctttctctttctttccatctcgatgagattcttcttcttcctcgttcttatctcgaccatattcttcagactctctcatgtcagctacttctttctcctctcaatttatttcccttattttctctcatgtattttgattttggtactttttttagacaaagctgtgatcatattttttttgtcatcataacagtaactcagatattaaaaatttgtaaaaagaattttgatgaaacaatgatagcagaaactgttccaaaaaggtgaaataacgtagcagttgttaatttatctaaacaaaaccacaatgcaaacgaacagaccaaggagaataaaatctctatctcaaaaatattaaaaaacatcattgaatgatagaggagattttgcagcaaagacctctgctttctccttctccagctgagcttccaggtctaagcatttctgtttcaaactttccagctcttcattgatttcctgcatccgagtttcaccagcctcctctttattcttcttttctgatatctcaacaagtttcttctccaaccaatcaaccttaaatccagcatcagttatggatctgagtgcaacatatccctcagctagatcaaccttgttgagctcctgaggcgactggcgcagagtctcaatgagactgagtagcaagctcatgtaacctgccctaagatttgggttctttaaacggaattcagatgcaatctctgggtgtttttcaaacatatgcctcacaaagtccacctgagagttacaaaatagaatccataaatattgaacacatcatgttgtctcttgttgttgaatatattctacacaaaacgttagtagcattcttaattttaacctgtgagggaagaagttgaaagccattaaaatccatgctttccattattgttgaagtttcctctgacacatcgagtttcccaataacttcaagaacctctatctcggcaacaatcttgagttctccattaaccagaaacccgctatctttggcattgatttcatttagaggaaacatggataggcgaccccagcgaggagactgcacatcaaaccacttttgttcttctgtaaaatcagaaacagaatttatataatcactccatttacgtgcaaacaaaggactaaatgaattatatatgtttctgtggattgaacaacaatgctaacaactaatacaacagtaacaccatgatcccacacaaacacccttgagcaacatttaactcaagtcccaaaacgagtctcacaaatcaccactcaccagatatacgatgtagcaaaacaaaatgtttgtgtttgtgatcattaaaatatatttggagaaaacagtagtgagaagaaataagtaccattttgtttggaacgtttcaccgaattttgatttactacatttaggagatatcgggcatgtcttctccattcgggtgacaatgattcataatcagctacttccaaatacagaaataagtaatcaacattatttcccttgggatagacaagaaaacgcctgcaaaaataaagtctaattaataagagagtcagcaaaactgtgtagaggatcaatcaccgaaggaaaacgccttaccatttacatccaccgacgatgaatggatcagaataaattttctttgaatgtaaagatgaaaaattctcgatagcccaagtgatcttcttagcaagttgcttccccattgatcttggcaaagattattctgcaaccaaaataccataacgtgaagagaaaaaaaaaacctaaaaaacttttttttttcttgaattataaaacaaaaccctagaaattaatttgataatctatcaacaatctcaagcagagtaaccacaattgaaattaagatttccatatggaatcgaagtcttgacaagtctaaatgccactctaacacgatttcttaccgtatagggtgaaatcaatgagccttgaatccttttttctccgtaaaaggtttagatgaggagactccgttgtggtacttaatggaaaattgttttttttttttaattgcgactgtgatttaattaagtcctagagccactctattggcaagtcatctagtggctagtacccacttgatgatattatttttttcgttactctatctgttttaagtttttatactaagattgctgtaaaaaaaaaaagtgttcatactaagataggttacaatttttttcatcaagattcatattgtataatccatgtgatgagagattctttgcgcaatttttcacaatatgtaacaaaactagatatgtgaactcttaagtgcttaagatcgcacgagagaggatttttagcaacaaaatcctctgctttattagctatcagttttaatcttgagacctgatgaaaacataccataacatatttccaattcaccacactgttaggatacagagcgattactttgtcatcaagaaatttatctttataatttaaacccattggttcactagaacaaaaggaaggattccattaatattgcttccactttaaaagaagactaataaattcagagctaagacacagcaaaaacaccaagtatattatcaatctaaaggttctgtgaacacaagaacatcaaacaacatcttcgaacgatagaggaacattggcctcggacacatctgcgttctctttctcaagaaaagctttcagctctaagcatttctgatttaatttctgcaactcttcctccgctcgttgcagtcgagccttacccgtctctactttcttcttctttgccttaacttccgcaagcttcttctccaaccaatccaatcttaagccaccattttccacgtatgacactgcaacggatgcttcgtccagatcatcgtcagtgagctcctcaggtaactggcacaacgtcttaattagtcctaggaggacagtcatgtatgttgacttcaagtgccgattctttggacggaattttgatgcaaagtctggatgtctttcaaatatacacttcacagattctacctgccagtcaaatttgaagatgcataaactatatgtcatagaagtttttagagacatgaatacatactatattactatgacatattctaatcttgtgtttcttacctgtgaaggaagaacttgaaacccattgacatcaatgctttcctttactggtgaagtctcgttgagagaatcaaaagacactgcatcattatcatctagctttatctttttcagaggttggtttgtctcttcagattcttctgatacatctaacttgccaataacttcaagatcatttatctccacaacaatcttgacttctccgttcacaagatacccagcatttttggcatgaaggttgggaagagggatcatagatgtaaaacccgagccaagatttctttgattaaaccaattttgtttctctgttcacgaaatatatagaaactctaatccaaacaagcaataaaattgcacaatgcataacaagaatcttgcagcagcacaaagccacatgagtgtccatgacaagttgtagaatcataaaatatcctttataatataaagtttagaaataaagaattatctcctcgttgggagagtttgtccgtaagttgatttattatagttaaggagaattgtgcatatcttctccatccacaaggcaatgctctagcatcatcaaccaccagatacagagacaaactattattaaatttatttccctttggataggccagaagatgcctgcaaacaaaaagcagttgcaaaaaaaagtggatgtcctcgtaaacctaaattggactaatacagttagaaaaaaagttttagtttcttaagtaccatttgcagccaccaatcacaaatggatcagaataaattttgtcatattgcaaagtggagaaattcttaatcacccaagtgaacttgttatcaacttcttcactctccattaaagactcctcacaaccaaactacctttaaaacaatgccacacacccaaattcatgttatataccaaaggaaacacatctcgagtaacaaaataaaaaccaaaacctaaaattccactatggactctaactgacatgatatcctcaacgctagtaatcttagcttccacataaagacgtcaaggtcgaaccaaacgctttaaaaaaaactaaactctaccttaatgagaagagacaatgaaaagggttgttctaagacaacagtcaacggagactaagggaaaaaagggtttcagactctgaacgcttacatgaatgcaaatcaaattttattaggaaagtgaatcacttttatatggcttaggaaacatgacttgaaaactagagtaactaatgttgtatataatttaatgcatactataaataatcaatagtttccccaaccatggtgatttaccagggatactctgtctctcttgttactcagtttccaaaatttccatattcaaaaatttagattgtataatttaaacacactttagtttggatatgatcaagggtagttacttgatacagtttagctcctatattcaagggattgcatatatttcattttcaagggattaactacttcttctatgttctgctttgatttattgatttcttctagaaaacacatcttaaacttttctaaatttaatgttggttaaagtaatttaaaaaaaaaacacttcaagcgcacaatgctttagcacaaaatgcctaagaaagaactcaagacatcaacctatagaggatctccacaaaatgtctctgccttatcagagggcagtttttcaaagccttgtctaaaacatcttaagaacatcattgaacgagagaggaacattagcggtcaagtcatttgctttctccttgtctagaatatctttcaggtctaagcgtttctgattgagtttctgcaaatcttcctctatttgttgcagccgagccttaccattatccacattcttcttcttttcctttacttccttgagcttcttctccaaccaatccactttaaagccaccttgtgacacgaataaaactgcaatggatgcttcatccagatcagtatcagagagctccgcaggcagttggcacagcgtttcaattattccgaggagtacattcatgtataatgtcttcagacatggtttcattgaagggacttctgatgcaatgtttgggtatatttcaaatatacgcttcacagattctacctgtgaaagaagaagaaaaaaatatcataaaagctttagaagccctgaatacatacagaaacattttgtacatcagagtatttaaatacagaaaaccacaaagaagtatactcgcattaatcttaagtttcttacctgtgaaggaagaacttgaaacccattgacatcaatgatttgttgagtctgtttgagtaaatcaatagagttggcaccatcattatttgatgtgccaataacttcaagagaaacaacctcaataacaattgttatttctcggcaaatcagaaaccctgcatctcttgcaagaaggttgaaagggggtggtactgttggataactacaagcgggaagattctcatcaaagtataggtctgaatctgtagcatcaccacaagtattaaaacatcaatatcacattaaaactaatctaaatcagtcactcattttgcaaaaagtataaatagaagaataacctgtcacaatggagcgtttatgagaaattccatttactatagttaagcgaagttttacatgtcttctccatgaagaagtcagtgattgacaagaatcagcaacccccatgtattgatagaagaactcatagttagttccctttggtaaggctagaagacgcctacaaaaaaaatcaaatcaccagaacataattagatgaaaagtacgtttggaacaaaagttggttcagtttttaccatctactgccagcaatcagaaagggatcagaatgactctgcttaggataaaaaacgttgagatcctttatcacccagacaaatttcttgtcaacttccttctccattatattactcgcaatgaaactacaacagcatgaagagaattaaaccaaattcatgtacctaccaatcaaagtatcaaacacacacactctccaacaaattctttcttagtttaacaaagattttactatgaactcaaagacatatgaagtttcagccagcagtttaaactacttaaaactagttgaccgtagttgaggaaaagaaatattctaagacatgcaagattaagggaataaagcgattacccttgagaggcgagttgaaagagaaacagcgactcagaagtcagaactcgtacccactttgtccaagttagtccaagtttgtcagagctacgaacccaatccaaaaaccaaattacttggatcgaatagttcaaaaacgagattcaaccatttttataacattaatcctctaaaccaaaaaaagggagatatccaattccaataaggaaagaaactaaaatcccttctttggaattgacttttccaataaggaaagaaacttggacttgagattctgtttccttttttcttggtgaatagaccttccaaggctttttaggtccttttgtgttaaagagaggaacaggatgccaaacgttttcaaaaggggttgccaatttcttttttgatttttttttttttagtaaaggatacagatttttacagtaaacttaggaaatatttgtttaatttaatgaagataactgacgcttttatatatataatcttgcaacaatttgttcaagtcatacccttacaaaacaagtaactaaatattagagcagaagtgaataaaagaacctaaaagattttcttagaaatactatgttacatctcaatgtcttctagatctggtaaagggaacctaagaatagctgcaattccagtatgctgtgctagttgttcccctgaagcatgcattgacgaaaatataaaaacctctcctcctgaatctttcaccgactccacaaaatccacatacttcttccttgttttcacgtcagagttcctaaatagcccatctataatgagaagtgtttggattgccattcgttcatgagcaacttccacatgttttggtccataacatgctctatttggatcattcgaaaacatggtgaagaaatcgttgagagctttgacctcttttgctgctttagtatctttgatcatattcatcacgttagggtcatgcaaaacctcgcttaggctatgtttatatcctgagtttgtgtgcaccagaatgaaacgtgatttgttctcaagaataggtctcaactgtcttctctctgcttccaacaataggtggcgatgaaactgatcttttgtaaacccgggacttgcaatcactgcgcatcgaaccacactgaagtcaacgtgtttcagaaaggcttgcacaacattctcaaagaatttcttcaaaactgactcgtaaccagccgttccagctccatgcttccaaggaatcgatgtttttattcgtgcaccgcaactttttacacttttgccggcaaggaagatttgtgccagtccttcttgcattagaactacagctaaatcagcactagctgcaagatctgaggcctgcttgagtgtatcaagagccagtgagtcccaattttcctttctcaataaaaaaggtcgtttaagctcaatctccaaagtatggaatgcaccaatccttacatgctcgttctccatgatattcttcccgcgtatgcgcataacatcgccgtctttgtcatagtccacctcctcaacttgtacttctagcttaagtttaacacgttcagtccgggtgaaagatcttttctttccaaggtatttgctttctattcgacttagcgatggagtcgagtctcttccttcaccaccaacttttctgaaagtgatagccattacactatcctccgggccaatcaggttataagtataccagagatcatccgagtcctctgccatcatcttaacgcttccgggtccattacgaacaaaatccttgcgaatgattttcatctttcaggatttttgaaggtattttccactaacagaatctgaagaataaactgtcgatcggaaattgtggtagggaatgaagaacaatcaatcgctctgacaagaagagaagaaaaaataaaaacttaaagtaaacttttgcttaaattaagctgttattgatctgaagaaatagacttgatctcctgagatatacatatttatagctagctataaagcttacataagtcgtctaggaaaactaggaaacgtattttccttttctacattgttaagtattggggatagagattaatctcattaggattattcctatatatcttctgattatgtcctatattttagggactagagtatatcttatacgatgtctctcttgtataaatattatactttgtgaatcaataaaatcaagttagtgcaatatctaattctacatagtttctttatttcattagagcatccttatccataggttgttaacaatatcataagaactattaaaatattatattaaacaaaataagaataaaaaaattaaaaaaaagtatacttaagagatgaaaaatggctcttagctaaaagtttttagatacattctctctagcctttttaatatttaaacattattttgtatatatcaaaattgtttataattctatgtaagagtcgattgataaagatggtctaatttccttttcttaatttttgacgtaaattaatcaaaatcacgtgctgctcacatgttgttcttactattttgctcacttcttgttgttcttaggatatctttcgaaatcattggaagatatgacacaatttgaatggatattaatcatcatcatttcctaaatctttttcggtagtttgtatgagattagaagcggctacttattatcttgataaggttaatataaaaatagacataaaaagagaaaaatggaggagaaacataatggtttagcacaatcgaaaatagagtactactctgtttctcacttgatccttcactttcactccatctccttttctcaaatccttcctcatgtttttgcagcaccactattcaagccttaaatctcatgacggtagagaaaaatggaagttatgatccaagcttagtgatttcccacttactcaacaaaagagccatgtttttggatatgagagcgagaatgtgagattagtcaagaaacttaaaatatttgtccacttgttttatggtgattagtcttgtcactctcaaaacacattactttaacagcaagaaactcaatattttctagaagaaacctagaacttcctcttgaaaacattgttgaaaatttccaagatatgtctcttttatcttccttaagttttaagaagactatcattacgaacctataaacgaacagaccagcacactaagcagaaccaacctccaagtgtcctaaaaacacaagaacatcaaacaacatcatcgaatgagagatgagcttttgcagccgacaccttggctttctcttcctccactagcgcttccatttttgaacacttgagcttcaagtccttcaacttttcctccatttctcgtagccgagtctcaccagcttcatcatcctccttcttttgtgccacctcataaagtttgttctccaaccaatccaacttaaaccctgcatttttcatacatccaattgcaatatatacgtcacacaaatcatccttggagagttcttgaggtgactgagataaagtctcaatcagactgagtagcaaactcatgtaaccagtcctaagacttgagttctttgggtggatttcagatgcaatctctgggtgtctttcaaaaatatggctaacagattttgcctgccaaatgaaaatacaagtataaattcgcatccctattcaaagacagtttaggagacatgcacctcaaaaaagaaccatataatagaacactatctatctacacacaaagtctgtaacattcttaaattgtatttttacctgtgaaggaagaagttgaaagccattaacatgtatggtttcctttactgttgaaataccttctgatacatctacgtctccaataacttcaaggatatctatctcggcaacaattttgagttccccgtttactagaaatccactatctttggcatggatttcatttaggggaaacatggatggacaaccccatttgattgagtcgtcaaaccactcttgtacttctacaaaatcacaaaacataatcaacatttaaatgcatctaatatatcacactacttgaactatgctctaggcaaataaataatcaccatttggttggaagctttttttcgagttttgatttactaaagttagggtatatcgagcatgtcttctccatccaaaaggcaatgatccattatcggcgacttccagatacagagacaagtaaccaataaagttatatccctttggataagcagttagacacctgcaagaaacacaaataatataaaagaatcagcaaaacgaagaagaatataatatcccctaaacctaaatcttcttaccatttgcagccatcgacgacaaaaggatgcagggataccctcaaaaggagaatcatctccgtaatcaaattctggctccgactcctcttcatacgcagaataatcactcatgtagttatctggatatgaataatcactatcatattcgtactcgcagtcctctgatacgcgttatcatgctgcagcaaatcctctttatatgcatgacgatcgtaattcataaatcttctttagtgcttcttcgtcaaaaaagaaaatcttcttaatttccattaccatcctcacaacgctgttccccatcgaaattataggaacctctcccgttcaaactgcagaatgtaaaaaagaaaccagaaatcagtacttttaaaaggaacattgtttaaaatcaaacggagaaaaaagagattatacataccaagctagctagctagggagttttatctaattcgtgagtttcttcagaatgcaagagatggatatatataggatgattaatgattgataccaaaaataaagaaggtgtgcgaatgtaaacagcctttgctcatcgtaacttgacactctgccataatatgcagaaaaagcatgcgtctcgagagaagtgcttgaatgcgaacagcctttacatcaacgtgtttattctgcatgaatatgaaccaaaatatgacaatatcaatgaatattaaagaagtctacgtcgagccacgagccatgactcttcaagtgccacacctctgtttatagcccaaagagattactttttttcttttatcttcaagattagtgtcacaattgtataacattccttcacaaaaatatgaaaactttccacataagaggattcatttcaaaacatgccaatgaaccgagtgctgaagaacttccaaagaacaaatctttgcttcagacgcaagaaaataaatatgtcgtcaagaaactaagtgctaaatcaaatgtggtagctgaaacttgcttgataaatcatagcgtacaaaggtggaaacttcaaacataagttcaattaccttacaagagcaaatcttattttgaaaccaagggagaaactaagatatcagaacaccaaatgcctaagaactcaatgcatcaaacaacatcttcaaatgatagaggagttcttatagctgacaactctgccttttcagtatccattagagcatctagctctgtacacttttgcttcaatttcagtaaagtttcctctgtttcttggagcttggccaaacaagaccgctctttctccttcttatctcttacttggtccaactttttctccaaccagtccaccttgaaccccgcatctttcaagtatgtcagcgcgatgtctgcttccacaagatcttcattggagaactcttgcagtgactggcacagcgtctcaacaaggctgagaaggaaatccatgcatgctttcctcagatattggttctttgcacggaattctgatgcaatgtcagggtgtctttcaaatataagtctcacagattctacctgcaaaagagagaaaacataattttacaatgcatataagataacatttatttagatatttggaaatagacgaagacatgatctcgtctcttgtaaagtaacaagaagtttgcagcattcttaaatttcttacctgtgaaggaagaacttgaaatccgttgacctccatgctttcctttctgggtgaagcttcctcaagcaaatcactagacaccgcaccatcatcattaagcttaatctttttcagaggttgggttggatcttcagattcctctgactcatttaaggggtcaatgaatccaagagcatctacctcagcaacaatcatgagttctccattaactagaaacccttccttttcgtcatgaagtttggtaaggggaagcatatataggaaaccccaaccccacatttcctgatcaaaccagcgatgtgtttctgtaacaattcattcttcgttaaccaatatcgaaaacagtactccttatcagtgttgacaacttggcaaaatatagagtgatgaatatcagtgttaagaatcacctttcaataccgagcgttcttctcacacctgttttactatatatagccgaagttttacgtatcttctccatccagaaggtagtgatttaaaatcagcgacttccagaaacagagacaagtaatcgcagttgtttccttttggatagatagaaagacgcctgaaaaaaaaagaagaaacgagtcaataaaacctatattttttgagttcgacaaaaacttttaaaaggtaagtttcttataccatttgcagtcaccaatctggaatggaacagaataaaacttcttacattgcaaagaggagaagttctttatcacccaagcgaacttcttaccaacttgcttggtcattgatgtagtaaaagattcttcctgatcaaactgcaggacctgaagaaaaaataataagttcatcacacatccacaaaaatccaatagatcagtggcaaggaaagagagagagaacacacaaacttcgtaaaccaacaatgtagtactagtgtaaatagaatcatataagttgaattaccctgtgtgttcattaatattgatataatagaatcaaattataggtatggaaagagagaaacattcagtgtcgcatgcagaaacgaaacggaggcaaagaaaaaaagaaagctatgtttacctttcagagtcttgaggcagtttagtgtttttgaggaattctatctgccacagatagatatacgaaatatgcatgagtctcgattgatgtgcgcgaatgaaaacagcatttgtccctcgtgacttgatactctgccataatttcgaattattatgttgtatgagtattaaaagattcttggtaaagcgcaggtgcatgaagaaaccagaggatcaatgattatttgaggagaaaactaacagagatttaggaaaaaacagagaaaacgaaaaaaagcgagggatatatatatatatatatctatgaatctcgaaatatgaacagccttgactcatcgtgacatgatactcacctacggccacaattacgtattaaaataatagaattaccaaaaaaaacatttaaggagtacagaggtttaatttgtttgttgaaatttaacaaaatcaacatcaaaaccaagcaaaaaaaacttaagattcaagcctcacaaaattacttttacattaagtaacccagcttaaaccatttgtaaggtactactccattacaaagtactacaaaaacttttaatacttagtcatcatagtcaaagaattc

SEQ ID NO: 112 - DNA, 94239 bp, Arabidopsis thaliana
gaattctatctgccacagatagatatacgaaatatgcatgagtctcgattgatgtgcgcgaatgaaaacagcatttgtccctcgtgacttgatactctgccataatttcgaattattatgttgtatgagtattaaaagattcttggtaaagcgcaggtgcatgaagaaaccagaggatcaatgattatttgaggagaaaactaacagagatttaggaaaaaacagagaaaacgaaaaaaagcgagggatatatatatatatatatctatgaatctcgaaatatgaacagccttgactcatcgtgacatgatactcacctacggccacaattacgtattaaaataatagaattaccaaaaaaaacatttaaggagtacagaggtttaatttgtttgttgaaatttaacaaaatcaacatcaaaaccaagcaaaaaaaacttaagattcaagcctcacaaaattacttttacattaagtaacccagcttaaaccatttgtaaggtactactccattacaaagtactacaaaaacttttaatacttagtcatcatagtcaaagaattcttcactaaaggcttctgaataagtatcatcatcatgatcccaatcctctccatatgcatagcattcattagggtcttctgaatcatcatcgtcatagtcccactcttcatcacttacatcgtctggatgagtatcatcatcatgaccaaagtcctcttcagattcgtagctttcacttgtgtcttcctcacaagtatcatcattctctgaagcaaaattatttgcagagtaatcactcaagttctctgcaaaagctaaatcaagatcccaatcttgttcatatgcatagcagtcatttatgtcctctccataaggataatcaaaatcaaagtccccttcatatgaatagccatcactgtggtaatcaagatcacaaccctcatcacaaatatcaaagaaatcactccagtcgtccatcggtagaaaaggaatctcttcagctcaaactgcaggagaagaagctagagtgaggatcagtaatgacaatataaatagttaacatgatcagaaatagaacagttaaaagagatgaaagtatcaattgatagggaatcgtccttcggagaagcatgaataaagaaaaacagccactgtattcctatatgaagcatgcatccaacgatattcgactccaaaacgaaacaaagatgaaacataaattgaaaggcaagtgcatgcatgaagaagagaaaaatagagaatcagtgcctcgttgattattaaccttaattgttgcatagaaggagtggagatttatacttacagagtggaaattctgtttctgtaaggataattcttcctgctacaggtatatatatatatatataccatgaagacaacacaggcatctctaaaaaaggagcaggaatgcgaacagcctatgagttgatgatactcggccataattacgaaataataaatgctgagagagtgaagccgcgactcttcaatgaccatcctctgttcatactcgctacatttgtatcgtcaagattcatatccgtactccatttgactacctcaaccgcacattactttgatatgccaagaaaagtttatataaggaagaaggagaatgctctgtatttggcacgtgagaagccacttgtgtgaagagaagtggatactctggaccatttggagggtttgtgttatgatctagagtataaataagtgaacttggtatacttgtaattgaaggtgattcccgagggatccatcttgagagattcatctagattcaatttattgttcttgttaaggaagaaatagcttgttctttaacatagtttttcataatacctaacaacttttaacacatgagaaaaaaaaccaagtcagtaaagaggaaagatttctgacagccaaaacctctggatttcagagacaagttttgatttagggtatgattggttgggctgtagaaaatttttatagccactaaaaaggttacagccttaaaattgaaacaatcatgcggtagctttcctattttttctcacagcccaaataatatttttttaattattttggctgtaagtacaagtttttctaaagcacaagtttatggtctttagaaagtctgtacatttttcttattttcttttcatttttttttttttttttttaaaaaaaacattactatagttgtcatatatatatatatatattaaatttagttttatagatataaatagtaggtaaatatctattttatgatatatatatgtataaaacacacattatttttaatatatatatatactttaattgaattgatatttgtgaataatattatataaacatcaatacaatttaccaataatacttttttgtttaaaaatacatacaaccaaaatcttatttctacatccaatttttctttaagtaataatattatattaataaaacttacagtctaatttctacagcaataaaacttacagctacagccatcacacctacaacaaaaattctacagcaattaatatacagttacagacgaaacaatcacccacttagagtcctgaaatcagactgtaacatactccagttccagtttaccaaaaaagcttgtcctattcaccagactccgttaagacatacgaaattactttttcaccaagtaacatagcttaaaccattttgtttaacggaactaagcgactccattacaaagtactacacaaactttggagcaaagacaaaaccataacaccaactcaccaagtagactcatatatcatgaaacaaagaatgagcaaacaaacgaaaataccaaagaggcataataataaaaaagcatcaaacagctgcatgaaagaagagcttccagtccaggtcttatcactttccaattctgagaaaagtttctctcctttgctgccaagtgtttctcatgcgccttaccaagagccccgattagaaagaagacgataatcagaaatgttacccacatacgtttgttctttggactggttttcacagaattttcaacctgcaagtgaaaaatcagtctttttagacttgaaaactgactacaaagtaactctagtctagttttgtccttgaaaatcaagatctctaaacttacgtaaaaagttcagaaactgaagtctgaagagaaagtgaaggatatttcttcttattctctctgtaaacggtatatactaattgtttttaggtttactcattttaatcgtctttctactgtaaagtaacacaaaagtttaacgaattcttagagcatcattattgggggattcttagtgtagttcttaggttaattggatgtaaaaattaatgattaaattgatttatttgctaagaatagctcttatataagagcaaaactaagggttaaaagttagacaagtgtctattgttgatttgctgaatgataaatattaaaggagcaaaaaatcaattcaaatttcaatctcatccaatgaattagaaatgtcaaataactaaaccatttgttcttattttttatatcatctatattaaactatcagccatttttttttaaaaaagttatatgcccataagacattaacaagattttggttagtctttatgaatgataagcctttcaatttgttatctcatctatgttaaactatcaaaatttgtgtgttttgtaatgtcatgtatgtatataagttgtaataattattaagttttttaaaattaaattgcttttatttttttttatttttattttcttcttaagaacttgaagctaagatcccaccattgcatattactaaaatttcaatctcttaactaaactcttaacatcaaaattttcaaaatcaattatatatatatattcttaaaaactaacctaagactacactaagcaaccatcaataatgatggtcttagttatcttacctgtttaacattgttgctctcctttggtggtgaagttttcttgagcaactcattagactcagcaccaagattctcagttttcttggtcacaagtttagatgcctcttcagatttctctgattcatctaatgtgccaataacttcaaaaacatccaactctgcaacaatcatgacttctccgttgacaagaaatccaccatctttttcatgaagttttgaaagagaaagcattgctggaaaaccccatgtggttgacttgccatcaaaacagtgctctgtttctgcaacattacaaatacaacatagtcaaaacccttcaagaaatttcaagccttgtcctaaaagcatccccaaaagaccacaacacacacttgaccaatatctaatttagtcaaaacaagctcaagattatatagaattggtaatgaatggaagtagaaggatttacagattatatagaatttgtacagtcaaaatgtttaatgtaagcaaatgctactaacacaggatcaggactattaaaaaaaatgtatccaactagtgagcagagagggtaaaatttcacctttccatacggagagcttttgggaaaattgatttactatactcaagcggaggtttacaagctttctccatccataaggcaatgattcagcttcatacacttccagatagagagacaagtatattagagtgtatgaagaaaggagagagaggccgatgaggccgagccatctccaagaaagagaagaagaagcagaaaggagtcaaggccgaagtcatgaaaacaaggccgaagatctcctcatcaaacgctgaaaaagccaagtaaagagccgtgaagaacaagtctcggcctaagagagtgtccaaacggttttatgtggataaggccgagactatacctcaagatgaaggcttgagcttgtgttaagacccaaaggaaataaaagagagcccaaggaagaggcccattcgtttgagacaagaatagggaaacaatgtgtgtgtgcaaccatgaggggctgtcactatccacgccttggggatgcttatggacgttggagtatgcaaacaagggatgatcacatgttctattcaggatttgaatgttaggacatgtcactttcagtcttaggattcaccctctctctcttcacgtcgctttctctctttggtctttgtgtagagttcgaactctcctctttgcctatttaaaggctgtgtttctctttgtaatacaacaagaataatagacaagctcttatatcattttgtgtagctctctcttctttacttgtgtttaactaaagagttacaatgtagagagatagtgttacacgatttagggctgccttaaggcagcctattgcttgtcatacacactcttaaatacactctaaactcttctttagttagtacttattctctagcttactgatcctaaatcctctttatcttaagtacacaaactctaagtgttgttgtactagacaaggattagcctcaaactagatgttttctccttcatataaccgatttactctctagtatattcggatatattgttggttatttgtgtggatttcatcacaagttgatgttctcttcctctattgaacgagttcactttgtgtgggtaaagggagattcaatcaccaagtgattgtctactctctcttgtgagctttgtctcataaaacctaacaaagtattcactgttatttcctttgggaaagacaataagacgcctgcaagcaaaacccaaagaacagaatcacaaaccatagacgattcacttgaaaaccaaagtagatgaaaaggtccattttcttttaccatttagactcgctgatcaagactggaacagaacaacacttctcagactgcaaagaagagaaatcctttatcacccaaccaaacttcttatcaaaaggctttgccattgatgttttaaagattactcaaaatcaagatactagaacctgagagaataaaacaccttaaaatgatcactcgtccacattcataaacctatgccaataacacacaatctaccaacaataacaaaccaagaaaagctaagattctacttaggacccaaaaggccaaaactcagtacagaatgcaaagataaagcagcaatacttactagtgccagtgacactgaaggagttctgtcttgtttgcaagtttcctccggcaataaatatataaaataaatgaagagcatgcaagcatctctaaatgacgtgcggcaaatacgagcagccttggctcatcgtgatttgatatactttaacaatcatcattaaattaaaagagtagctagaaccacctggcttgaccacgactcttcaagtgcctctctctgttttcaaacacaaaaatattactttatcttagaacccaacaaaaagtagaaatttatcctcaagattcataagcatgtgacttcaagtgccactctccgttcaacacttcacaaaatatgacacaattctctacatatttggattctcatttcttaagcttggaactctccaagatttctgttaaagcgaattagtttgtggtcaagaaactcactgatacaatcattagccaacaactttgataaatcatcaccgcaacttactttaccacagaaagtgaaaaactaagatattaaaacaccaaatgccttgtaactcaagtcatcaaacaacatcattgaatgacataggagttctggtggccgacaactctacattctccttctccactagaagatccaagtttgaacacttttgcttcagtttaagtaaatattcctctagttcgtgaagccgggctaaaccagactgttctctctccttcttgtctttcacttggtccagcttcttctccaaccaatccaccttaaatcccgcatcaaaaacaaaaactaaccgaaccaagagctacgatatagtcagtatccactgtccactcaattctaaaccactaattgaaccaaactcaattctaaaccaaaaagccttttaagttttgaatattcaaaaacagagtttccctccactgcgtattaagtcttaactaacagtttgtccattagttaatgaattccgagagcctaataaccttccaagatcaatgttacaaggcacttaaattgagtgatacaacaacgtatttggtagccgaagtttcagtagaccaaagcagtcacaaaatgacataagttcagttaacttccaagaagacctctaactttgaaacaaagggagaaactaaagatatcataacaccaatagcataagaactgaaatgatcaaacaacatcatcgaatgacagcggagatctggtaaccgacaactcgtccttcttcttcaccactagatcatcaagatctgaacagctttgcttcagtttcagtaaatggtcctccatttcttgtagctgaaccatatcagacagttctttctccttcttttcttttacttggtccagcttcttctccaaccaatccaccttaaatcctgcatctttcacatatgtcaatgcaatgtctgcttccacaagatcttcatttgagagctcttcaagtgactggcacagtgtctcaattaaactaagcagaaaaatcatgcatgatgtcctcagatgttggttctttgctcggaactctactgcaatgtcagggtgtctttcaaatattgatctcacatattccacctgcgagcgaaaaacaaagcaagtataaagattcgaagagaaatcttgtaaagtaataacaagaagtttgcgccattcttaagtttcttacctgtgaaggaagaacttgaaagccattgacatctacctttccctgggtagaggaatcctcaaatacatctgatgcaccaataacttcaacaataatcatgagatcttcgtttaccagaaatccaccatcttccacaaggagttcataagggaatgtataacccaaggtaggattctgctcatcaaagcagtgctctgattctgtaacatcaatttcacctcatgagtggatatgaaatctattttggcagcttggcaagaaacttgaaaactaagccgttcaaatcaaacatcctagaaagcaacagtaataccagtccaaactaagtcacataacactattattactaacaagagtgtgcgagtctgtgagggtgtgtgatattgtaactggcaatgacttggataaaaactcttgcatacaatcattcaccaaaagtgaatcaacaagtgaacacagtaaatagaatcacctttcgatatggatagcttttcagataattgatttactattgttagacgagctttgacaacttcagaagggaataattgagaatcaggaaggcacaaggtcatattcagcaagaagacgcctgccgaaaaaaaacaccagagaaatcaaaatgtatcaccagactttaaaataataaaaaacatttgtaagatgagtttcatttggttgcacaaaaagagaaaaaaaaaaaaaaagagtttcatatttaccatttgaagccacggatcacaaatggatcagaataacatttctcggaatttgaaaaggagaaatttttgatcacccacacgaacttctgcccaacttgcttctccgttggtgtaatgaaagattcctagcaaacaaataggctcttgtaatacagaacacatagcagcatgtctcttgtaaagtaccacaaagtttcttaactttcttaccggtttagattcattgacatggttgctttctttttctggtgaagttttcttgagcaaatcaccagactcattgccatcattccgtatttttttggtcagaagttcagatgcttttcccgaaatatctgattcagtcaatgtcccaacagcttcaaaaacatcaacctctgcaataatcttgaagtctcctttcaccacatgttcagactgataaagttcagtctgaagtttgcatatgggaatcctttctggaattggaataccccaagtggtacgcttttcgtcaaaacagtgatctgtttcagcaacattacatccaaataatgtaagtaatctgaaatagaaatctgcatgagcataaaacaaataaaaattcaagactgaactaaaaccccaaaacttacacaacacgcatttgatcaacatagaaactactacatgtatgccgagtaaaagattaaaaattaactatcatttatttagtgactagagtaagaagaaggatgaactagattactagaattttttgcgtttacaaagtgccactgacatatacaaaggacagttcaatacaatgaatcaagaagggagcaaagtttgacataattcacctgcttttatggaaagattgagagaattatgttggttccgtaaagttagccgaagttctacgtatcttccccatccacaaggtaatgattcaaaatcaaccacttgtagacacagagaaaagtacttatctcgaatgggataagcgataggacgcctagaacaaaacaaaatgacagattaatgaataccaacgacgatagtataacctaaatctaatttggtgaaattataagataaaaaggctctagttttaccatttgcagtccccgatcaagactggaacagaatataacctctcagattgcggagagaagttctttattatccaacaaaactttttatgagcttgcttctccattgacgctataaatattgctcaaaatcaagatacactgtgcctgaagataataaaaaaaaaaactttaagatagtaagccaaagaaacaaacaaagatcccactacatatgtactcaaagactagaaacagttagttgataaactctctgatttcaaaaacattggtaacaatgaagaagtaaaactagaggatcagatgcttagttgagaatcataccaacaatggttttgtcttgttctgaagtttcttctggcaaacgataaagatatatatgaaaaaatgaaaattctaaacttctcgattaaggtgagcagatgcagaaaggagagtctcgattgatgtgcgcgaatgaattcagtcttggtccctcgtgacttgatactcttaactacgaattaatataggagcctaggtaaagcgcaggtgcatagagaagagaaactagaggattaggtgtgagcataatacctgaaccggaagaatcgaaccgaatccgatccaaaatatccgaatccgttctgcttcggttccggttaattagccgatcggttctgttttcaaaaaaactatgggtattggtattactcgaacagaacccgatacacgtgaatactttttactacccgaacatacagtagaacctctataaattaatactctatataataataacctctataaattaataaattattccgatcccgagttgggaccaatgtaaaaagtgatataaatcgataaattaataagataataatttttttgaaagtcctatgtaaatatatggtctcatcaatatcataaattaataattctataaatgtatcgaatatatctctatattatatgtaaaaaatttcttaaaaatatatttataataattttttgcttaaattcatatttgttatttgtttgactatagttttcatattttactgtatcaaacattttggtgttgttttctagatattattattatgttttacttgtaactggttctagaaagatattttctaaaatgaaagaaatcttatcgatttttttaaaaaagttattaaattaggaaaatctctctataaattaagaaatattaatttatcgataaattaatacctctgtaaattaataaaattttgcagtcctaacattattaatttatagaggttttactgtatatatatgcattaataatttgaatttgtgacttgtttaatgatttgagttatggaataaggtcaaaacaaggtttacgttttattttagattattattttaagaaaaaactttggttatttatgggttctttaaccaatatccaaattatccgaatagaacatgacccaaaattgtacatataacctaacgaatctaaaaattttaagcccggaaaaccgaacccgaccagaatatccacatgcccaggactgcaaaggatcaatgatttgttgagagtcaaaccgacagagatgcattaaaacagagtaaaaaaacggctataatttatgaagaatatgaaaagccttggctcatcgtgacttgatcataagcccaaactataaattaaatgatgaaaatgcaaatgtatgttaaaggagtctatgtcaaagcaatagattcaagtgcaagtcactgtttcagacctagagaggttgctttatcatcaagattcatacccatgagagaactctccaaagagatctaacaaatttggtagctgaaacttagataatcagccgcaaaagactcccttcttcacaataagtgacaacttcggaaatacatgagagttcattatcttttaagaaaaactccgatcttaaagaatgcctaagaatttaagtgatcacacaacatcatcgaaggagagcggtggctgccttctctgtctcaaatttgtgcttcaaatcatgatgcagaacggagaaattaatttcactttcatcaatcgaaaacagagtaggggttcttcatcattttcagtcacatacccttagtcagtcactcagtctccatctcctcgactcatgcctatgaatccttccctgcatttttgcagcagaacaaaagcaaaccttgaagcccaggaaggcatagaaagtggagttattatccaaaaccaaaaatttcccagttactctcaaatagagtggagagtatgattacgtgtttggaacattgcaacattcttgcagccttcaaaacttaaatcctcaacatacactttagttgttcaaatgttttgaaatagttactctttaaggttaatttcactactcagtcccattcgacataaaactcaaagaatacaaacttgggccttgcttccaggcataagaaaacaaagattcacctacaaagccacaaaatcctgaaaatctgcaaacaccatcgttgaatgagagaggagctctcgcaaccaaagcctccactttttccttctgcagctgagattcaagatccacgaacaaaagcttcagcttctgcaaccgttcctccattgtttgtagccggggcccactaccctgctccatcttcttcttccgagagacctcatccagctttgtctacagccaatccaactcaaagccagcatcaatcagatcaacaagtgttacatcagccttgctcagatcatcctctgatagcttctctggcgactggcacagcgtctaggtgaggctaaggagtgcatttatataagctcttctgatctgtttgttctttggtcggaagcctatggctatgtttgggtctcttttgaagatatggtttaccgattctacctgctagcaagaacaaagtgaactatgatgaaacccattctaacctgggacataaaaacctcaaacccattgacatccgtagtttcctttgctggtggaatctctgtaagcacattatttgaagtctctgcaacagatgccacattgttaaacgccttaccaccagtttctactgactgagaggcatccttcaaggacttgttttattctacaagacttgtgtctctagcactgtcagtccaaacaagagatgaagcctcatcatcgacatcttctttatttgcataatcattttcattgttagaaacctcagtcttagatgccacactgttacaacttatagtacccgtataaaaagcatcctctatggcattcagaattattcaaacagttttagtatagaaattaagtcggttttagtatttgatcatcagttgttttggtttttttccctaaagttgaagtaaataaaccaaattgttaaacctgaaccaaagtaaaattcagtcaagctaaaaccaatggaagaaaaaaaagatatcagaagaccaaaatgcctaacaactcaaagtcagcaaacaaaatcatcgaaagacagagcacttctggtggccgacaagtctgccttctccttctccgcaagagcacccaggtctgaccacttttgcttcaatatcactagattttcctctatctcatggagcctggccaaaccagacatctcttcctccttcttttcctttagttggtccagcttcttctccaaccaatcaaccttaaaccctgcatctctcaagtatgtcaacgctacgtctgcttccacaagatcttcattcgagagctcctccagtgactggcacatcgtttcgattaagctgagcaggaaattcatacatgcgttcctcagttgttggttctttccacgaaactccactgatatgtctgggtgtctttcgagtatacgtctcacagattccgcctgcgattccaaatatatgagaaagagagagagagcattctttgtggggtttggaaacagagagaacatactctactataccatatattacaataacaattgaagatgaaaccgccttcttaccttggaagaaacaaccacaaacccattgatatccactgtttccttatctgattgaatctccataagcacataatcacaagtctccgtaacacatgccacggtgttaggatccctaccacgagaggcatcctccaacacgagatgaagcctcgtctttttcacttgttctatactacttccgtttctagcactatcattcaaaacaagagatgaagcctcatcatcaacatcttttttaggtgcatcatcattttcatcattggaaacctcagtctcagccaccaaactattacaacttctaatactcgtataaaaagcattctctatggcattcactaggttcaaacgacttatgtcacaaacttcatcatcattatcatcagtatactcctgggatgcatctccatcatccgaactctcttcagatgcgtcgtcacaatcatcatcatcatcatctaacttctcttgagatgaaataatcttcacaggttccaatggcacaacaatagaaggtaaaacatctacttcagcgacgatagtgagtctgtcattcaccaaaaatccttcagctatattaacaagtttttcaaggagcaagaaatcttgaaaaccccaaatgttactctttgcatcgaaaaagcatggccctcctgtgtcattcccaagaaacggaaatagttaggtttcatctaaccaataagatactacatagagaaaaagacagaacataaaactgagatcatatgattcatagagcttaatataaagataaagaaggaatcagcacgcatagcataatcactatcccaagccatgatcgtatatatgaaaacaatgtacctaatactctgtcggtattagggcaaacattgtcaagagtaatgctaaatttcacttctcttctccatcctggtggcaaagatccaggctcaagatcaagatacacggaaaagtaacgatcattcttagctcctttgagaaaagaaagaagacgcctgaacaaaagcaaagtctcacatctaagaatcaaattccacaaaaaaaaagaaaaggatttctgtaatcgtttctcgctttaccaattgcagccggcgaccgtgaagacgggagagtagcactgatctttcaaagatgagaacttttccaaaacccaagtaaatttatcttgcatcttcaaatctaatgacatgatcacaagttatcgccagtaaaaccctaattcgtaaacaagtaacgtgctttgaaatccagtgtggtagggtttgtgctggttatataaacttataagaaaggaaaaataataagctttccatatttcacagacccgagataaaccaaaccatacctgatccaaaataaaaattgattcaaactaaaccgaactaggttatttccaaaataagtttgttacggtaattgaaccaaacttgttgttatccgaaactttgatagaccgaccatctagtcaatatatacttaccacaagaggacctgttcttttgaaaccattgtggaaaataagatatcagaacaccaaatatgacttagaacactcagcaaacaagatcattgaaagacatagagattctagaggctgacaactctgccttctcaaaacttgatttaagctaattcaaaccgaatttaaatcggttcgttttgggtttatctttttctgagcagaacgaaaccgtaaaattgaaccaaactcgattctaaaccaaaagccttttctggatattcaaaataaacagttgtctatgttgaaagaaagacacgtgtctatgacacaggtgacgtgtcaatccagtatccatcttaaacatctgttaacactcttcatcttccacctactcaatcacacactagcattacgtaacgtatggtacgatctaaattattatacatatcaaaaagtggctggagccgaacaaaaaaaacatacgatagagaaaacgtacggagtaaaaaatggagacttacgttgatgcgattggagaggacacggcagccacaacaacgacggcggagacggctgcaaataagaacaagaagaagttgaaagtgatggttgcgattgatgagagcaagaacagcttcgatgcgttggaatgggctgtggatcatctcagagttgttattagtgccgaaccggaaaccggtcaagaaggcggtttacttacgttgcttcatgttcacccaacgtaccttcaatatatctatccttctggtggaactggtgaagaaaaaaacgcttctctctttcttttattctctatgcgtatatatatattatatgggatgtgactgtatacaatattgagtgagtttggaaattcttagcttcggcggtgtatgcgacagattcagtgcccgaaccaatgaggaaagcacgagaagagagtacgacaaacttattcacacgggcattggagatatgccgaggcaaaatggtgcgctatatgtgtgaaataatttcctaaaaattaccatcaagacatgtctagtttcaactttcaacatactacaagtttggaaaaaatttcaaaaatacaataagtttagggtctatgaagtttactttcagtttaggtttatcaaggtttcataagagtttaggtttatcagtgatcttctctgtctcttgagtttatggttttatgttgtaggtgaagacagagactatgatattggaaggagatcctaaggagatgatatgccaagccgtcgagcaaacacatgttgatcttcttgttgttggtagccgtggactcggcatgatcaaaaggtacaagtttcatttttggtctaaggtctaacaacaaattgagatttctggttgtgactattcattcattcctggtgtttgagatatacagggcatttttagggagtgtaagtgactactgtgcccaacatgcaaaatgtccaattctcattgtgcgaccgcctagagaaacctcaactagtaacacgaaggaacacaagagcaagtgaggaaggaaaccatgttataatagcttctgtttcattccgtttgtactccgtagagaagaaaaaaaagtgtgccgccaataaacaagtttacttttgcaaagtaaagttctacgtagagagattttgcaaaaaaagaaaatttcaactgatctttcgtttgtattagattctaaaccggaaaatcggtttgatcgtctggttaaagaacctccttaaagaaaacagacgctatacagtttctaaatgcaagtaaaagacagaatgagaaacaaacgttacaatacaagccaaaacagtactttgcgagttgttggtgttaagcctgcaagtttgatcacagtggtttcgttgttagtagtgcctaaactctaaaaatgagttaatagaactctagttcggaaaagtttatacctgttggctcattaggatctccactgctacggtgagatcatcgtcggcagcagcaagcgccacttccacttgtgtctgaagaaaatccagagactttaagccatctatttactattgttttagttaacgttggtatgaagcaagaaacgtaccctgtcaaagcccatggctacgagtttctggatttgttcttcggaagcagcaacacgaccctgtgttttaacagctcaataagagaaaagcttctagaagctgtacaagggtctgggtctgagccgaatatcttagagaagaaaagtaacctgggattggggcaggactgctgcattagctattggcgcttgtctacacacggtgagacatgagggtgaggttgaagaatggcgtaataagctgataaatcataagctgaagaaatcaaataccttgaatctgccacggtgttgacagttgcatcagaaaggcggtctggagagctgctatcttccagcagtctagcatggaggtttgggtctgtttctccagctggagcagtaggatctcgggcagtgctaagagttctacctctccccggaaatctactgtcctcagaagactgcatgtgaagtaatatggttagatgtgaatgcatccaccatggtaaagaaaagaaactaacaagattagcatgaacgtacctgattagatgcttccctctgtggcaaccatgaagacaaggatctccaagcatttcctgtagagaaaccactggtcaaagaaaaaatgtcgttaggatattctctgggcaaacagtccagtttttcatatgttcttaggaaaccacacctggatgttgtgttttgtgcagaataagtgggaatatagctggaaggattcccgccagtacacataatgaacttgggtcgcctaatgaagctagactggaagaggacatagaaactggatgagttacgattaactcagagagcaacatcaagaagccagatctgcatgagttttaaatcctcgatggcctctcaattaacaaagaaaaggaaacatcaagaagccagatcttcttaagtacttagtacttaccatccaggaggctgactcaatggtggtaaaaaatgaagagccaggcatcaagaaattgaagaggccataagaatctgaaatccaaagcgactaacaaattagctccccatgaaaatgcaggtttagaaagaagatgacaatgaaaaaggtcaataatcatacatgaaaatccagacaggatgccgcatagatgcccaagcagtgaaacatttgtcatgagaagctggaatactattagtaagatccacggatacctacacatggatacaaacttttacatcatatgagcaacaagaaatgcaggtgggcattaagatgccaacaagcaagacaatggagcttacagtttagcgggaacgttgaagagaccaaacacactgcacagagaaataaagtagcaaatgaagaaatatgagatgcttcatgaatacaaagagttggcaaaaaatagcccacattcagaggacattaaacgcatatcttattaatatgtgtacagacatgtgtagcattaacatgtttggagagaatgtatctgaattctaacaagaagctcatatttacttgcactttgatcttccagagtctaaatcatttaagtagcccttgaaaattcttaccttctagaggtaactccactgagacttgtctctatgacaatcatagaaaacaagattccagaaaatccaatggcgcattcattcatgagatgatcatattggtagaagggattatatcccgccaaggatgctataagaagatgcaatacggcattggtcgttgccagcaaaactgttaggtaaagcaaacggacagatcccatgattctctccagctcagagcccataggaaccaatgccatcatgttgaacagaacatgaagcagtgatccatggaaaataatggctgtataaaacctataaactgcacagataacgagaaacgagtgaacaagaggaaacaaaaaaaatcaggacagctcaggcatctgaatttaaaattaccagtttgcaagacgaaataactttggaaatgtaagttttagtgccaataggaatatcttctacatgacatgcaagcctcaataaatatgagaacataccttggaacctcgatatgattgccgagggtaagaagcatacttcataaaaagtgtcatatccagttaagaggcatatcaggtaaatgaccccacaaactaccaccaccgatgacgtgaggaaaggtatggcattccaccactgtccaactcgagtttgaaccccagcctatgagaaaataaagaatacataactaaccagaaacaagacctttaccagtttataggcttatatctaaacattgtgccgattatctacttggttggacatagaaaccttctaataatattcaaccttatgaataatttcagaaatcttcaaacaaaagtatgatccagagtcacagttgtataatagaatggtgaaattgtattattatacctaaaacttgaagaactaatgaaacaacacaaacagaggctgctataacctattttatgaagagaatgtttctactttctacaacgaacgattggccatgaaactgaagttatgccgaattgaactgctaattagttaactctaccgaattaagagacggtcgtactgatttctgctatcagccatagctcgttctcactaggagtttctcggtaattaaacaagctaaaacctcaacaatttctgactaagatcaaggaatataagcaatcagagcagaaaattgaacagatctcacctcggtaacaatgttcggcctcataatcgaagtcgcgaatcagtcctcttctctgatgcttgcgtgtgtttgaatttcaatgaccatggaagaagacgaacaactctcgtttctctcccaccgtaaaagactcttctcgagatcttaacttcttcgcccggtttagcactttgattctggtaaagtttgtagaaccgggtcggaccaaaaactttttattcgctgagagcaaacatcaatatttcatctcttcctcgcaaattataaagttgcaacggattgaataattttttgtgatgagctaattccgtatgtcatgttgattcatgatgcaataaatcattttggtaaatatgttgagattttgataataatgtaaaagtatatcagacttgagatctgcggttgcaacaagatacagagaacgattgaacaaagtgaggtcaccaagagaacattgatgaaaaatatccaacacacatgagccgatgagtgttccctgccacaaatgttcctccgctgctagaggataagggcttgaaatgccagacacctgagattggttaaggcgcatcgtcataagaaattaacagcaactacatgaacagcaaaaggggatgacgtgaacgcgtgagatggatttaagcacattgctttttgtgatcagaagggtaaaagaacaatcactggtttactcaagaacagtcaaaagactttagagaagcaacttacaagcaagtcacaactagctgtcttcttccaagcctcctaatctggtacctggatcataacttataaacagtcggaactcgtttccgagtttgctagagtgatgaggcttaaacacacaagggcgaacacccaatagctcagctgcatgttctctttgcacctctcctgcaagacgtgagatatctcctagttaataaatcataagatcatataaatttgacttgagaaaacaaaagtacccattgtacctgtgagaagaagcaacaatgaatctactgggcttgcgaggaacaaaattgtttgactaactctttccaggcattccctactctgccaagcataaacgaatcaagatcattaacacgctaactagaaggtactcaaagacatttatgctttgaagatagcaagcaatatagcacacaaaaacatcacagattaatgatatcctcacaagtcacaaatactcctacccgggaaatatttcaaatgataatcaaaacgcagcagagagccacaaagtatccatctttaagaagtgacactaagccatgaccataaccaactgatactccattgtaaagcttacactttttttctttcatcttgtctgcttttggactttctataatcttttaaaagaagattaatttataagcaatgcctatctagcagaagcttcttgaatgtcagaagttcagagcagattacacatcagtctctaaacctatctatcaaggggcagctaaaagatttccaaaattcccatgaaagaacagcatcggaaaagttaagaacttgaagaaactttaccaagtagggaggatctgcaacgattatatggaagcaatgtttcagctgaagcggcagatcttctggttcgttgtaatcatagaaagtgaactcttttccatatctctcgaatctcatatcgtactccagcaattgcacctgaagactaggatctcttttctgactcagcacaaatcaaaacccgtcgcacagaaatttagcatcaacgacaacaaaagtatcgatttttagcaaaacggattcgatacaaattaagggtactgaacaaaactgattaatagtaccttgagataaacgtagagagtagggcaagcaatgcaagcgactctgcagcctggaattctttgagagagagtgaccacttcatctgctacagtctctgcagtttcaggttcgtaccagaactggctgagtctccaatcctccgtaaccagctccactttatcggattcttctcctccggcgacggaagacgccggtggcgtgctcgcaacagtcttgttctggtctgctagaaattcccgaagcgccgccaaagcttgagaactcaacactagtggatcgtcatcttctacatctccgtctcgtggagctgaaacttgaccgtttaacttctggagctcatcttctttttccatttaagcttcggcgtcagaattccgggataaagtcagatccttcggaaaagagaggacttaacggacacagcgaattagagagggctagggctttggttctgcttgcgtttatacagaattttcataaaaagtccccaacttttgaatgttttctattgaagacatgaattgtttttagtgtctttgattggtaaactatttacagtatatattgttatgaattagaaaacagtagaaatcccataattagcttctgtgattttttttaatggtactttagggaaattattaaaaattgaagattttcttatgatttttgtttgggtcaaattgataatgttttattttctgggttaacataggaagtttgaatttttatagggacctagttttaaaagcgaaacattgacgccaaaattaggataaactgaggaggagccaacaaaaataacagagcgatcgtggaacagaggactctatttttctcccagccaatggaacagatttgcatcattgagagattgagatttcatgagaatctcttaaatcagaaatggccgccattatcgttctctctcacgttcccatctaatcctagacccattcaaagcctcctcatttcctttttggctctgttgttttcttccattaaaagaatctcttctctgtttcatttcgtctcatgggttttgtttgacttccaggttctgcttcttcttcttcaccctttctatgtttttggtgattcgatgtaatgtctcaatgatggaatttggatatttgacattttcaggacataataaggaactgcttgaatctggtttcaagtgaaaatgggttagtatttgtgacaacttctatgaacgtttatttgaaggcattttgatctgaggcatatttgtattgattgtgcagagacaaagaccattcttcgatcaatcagttttaatgacattgactcggattcaaccataactgaatcacctgaagctagaaagacgctatacaacagatcccttagcggtaaagggacacaacgatcaagaatttctccaggagatgtggagaacaatttctctattaaacctttaacttttatgaaagaagatgatagatataaaatgcggatatggaaacctgtttgcgaaaacgaacatgcaaaagaatttttagccttgttattaggtgatggaacatatcaagctgcattaaagttacagaaagtttatagaagttttcgaaccagaagaaggctagctgattgtgctgtagtcgttgagcaaagatggttcgtggtgttatgattattggcattggtatatatagagaggataaaattatctgtttagtagtaactaaatggaatttgcaggtggaaggtacttgactttgctgaacttaaaagaagttctatatcgttttttgaaattgagaagcaagagactgcagtttcacgctggtctagagcaagaacaagagctgctaaggtaacatcaagcctatcaactatgttggtttgatgcacccgttttcgttcccattgctccagtctttatataatgatttgaccatttttatccctaaggttggtaaaggcttatcaaaggacgagaaagctaggaagttggctttgcagcactggcttgaggcagtaagaatattcttttacaatttgtctttctctgtggctataagttttgtgtaaagccatgtgatcttaattttctagcttaacagattgatcctcgacatcgatatggccacaatctgcaattctattatcatgcttggctccactgtgacagtaaacaaccctttttctactggtaagattgctattacacaatcaaaagtatgatagtatcaagcgtacaaatttacgagctaacgtccaactttggacatgtaggcttgacataggacaaggaaaagaattgaaccacgaaagatgtccaagatcaaaactttaccaacaaagcatcaagtatcttggtccggtgagttttaccctctagtttctgtgcttggttgaccaattctgtagaaccttagatctattttcagaaaaacttggtagaccaatattattgacatgcttgttagatacctttttgtaatccttcattctttcttacaaacagacagaaagggaggcatatgaagttataatcgaggatgggaaactaatgtataagcaaagtgggatagttctcgacacaaaagaaggtcctcctgacgcaaagtggatctttgtcctaagcgtatctaagatattgtatgttggaatgaagaaaaagggtaactttcaacactcgagttttctagccgggggagctacattatctgctggaagaattgtggttgacgatggtgttcttaaggttaaagaaagaaatttactcgcttatacttatgcaaaagaagagatgttataagacactgcaaaaacgttttgtgttgagtttgagttcgttggatgatattttcaggcagtttggcctcacagtggacattatcttccaacagaagagaattttcaggcgttcatgtcgtttcttagggagaacaatgtagacctcgccaatgtaaaggtaagtccattctggtctgagttttaagtcaccaacatctcataggtttggctctggtttgtttttaggctatgattacatactttattttttatattctgtagaagaatccagatgaagaagatggagaagctcctgctaaggtcaagaggatgccttcaagaatcaaagagaccgaagaagaacattgtgactttgtggatgctgagaccggttttagtcccaacactaagcccaacaatcatgcagagctacaaacattatcaaggttccattcaaaactttcaagactggatgagattccagacgaagacgacaacatgatcgaggaggaacaggatgatgaagaagaacctgaaaccccttcagaacaagggtatgagacagcagaggagacattcatagctgaggaagagttcacatatccaaaatcaaacctgttcgatgaagacattgaagattacgagaagcctgtcctgaaggagaagataatgagacggatagattcacacaaaggaattaaatcttaccagttagctgagcggctacattcgagatggagtacaggtgcagggcctagaatcagttgtatgagagattacccttcagagctacaatttagggttcttgagcaagctcatttatctccaagagcttcttcaaattcttctaagatatctccttttgccccggttagaacacgaggaacaagtcttgggagaagtcctttggccgaagaacttgaaaatctttaggtcgatttatatacatgtgacgcgaatgcccatgtcatgaagtaatcggcttgattcttttttgttacgcaagataaaaaaactagggcttcatggaagaatggttttcttatgtgtgttccttattcttcaagtcacatattcattgttcttttgttggtgtagtaatttctgcaactctgcatatttggaaaaacagaaaatcaagttttttttggttcatatttttgtcatataattattttataatccactgaatcatataatcttcactaatttaattgtcgtctaaaaaatattcatccgaatgtaaatccaatctgaagctaataactactgtaattaggtttaaattagttcaaaatttaaacctaaagaaggagatatcgtaagacttggttgttctctgtttctgactgctctaagaacaaggaaaccttttttttgttctgttttgcttttccggattccttattgacgcttgtagttgactctcattctttctgaggtctgcttcttcttgaccctttgtattttttatttcttctccttaaatacacaagttaatctcgttcttttagggtcaatgttacatggttcttggatactaatagctggtttcgtttagttctcgtttacactaaacgttagttactttttttttttcctgttagcacacacgaattgtttgtttaatatgtgtcttctacgtttcattttaatttcttaaaagtgaaacttttggtagcacaaaatcaataaattggcagcaatcacaaaatcacaatcagaaagaaaaagatagtaattagactaaaattgtgcgttgagtcaaattaagtcacgcaaatcacacgtagacttcactttcaaaaagcgctgaatcaaaactggtggctatgaatttttcccatctctcaaaatctttataacttggtctcaaaatttaacaaatactaatttattaataaatcaatctctgtctctctctctctctttctctctgccagcgaacatccattggagctcctcactatacggcccaagagatagagggagagagaagacatcataattcccaaacaaaagactttgggtataaaattgggtttattgactttgtgaaacctacccagaaaatctaccaactgtctcgaagtctctctcctctttcttgaaacgggaaagagggagggaagaacaataagaagatgaagaagattctagaaagatcaatggaaggttcagggacatggcaaggcttggtgctcgttggtattgtcacatggatctgtgcttcttcttatcttaaatttacccataaatttagatctctcttacaaccatgggtcgctcgtcaagtcgttggtggtgtccctctcattctcagaatccaggtgcctcattaattagctaaagctatcagctttttcaaaatttagaattgaagctgatttttttgccttgacttggaatttaccattttgggtatatgcagaaatgtcagaatggagtgttggatgctttcttctcagggctatcttgtgttgtctctgttcccttttacactgctttcttgcctttgctcttctgggtaacattccaaagcttcttcttcaacataaaagtttaaatccttagtatttagagattttttatgtggatatggatgtacacttgaagtcttactaatcgatattccagagtggacatggtagattggctaggcagatgactctcttgattgcattctgtgattacttgggaaactgcattaaggtatttggccttctataacgcattctcttagtttacaagtttctaaagaagcaagtgttggttttatacgctcttctttatttaggatgtggtatcagctcctaggccaagctgtccaccggttagaaggattactgccactaaagatgaggaagacaatgcaatggaatatggcttgccttcttcacatactcttaacactgtttgtttatctgggtatgttgtctgctaactcgttaccagctttgttgtggaatatcatcatagttgtagaaactccatacctagctagtaatgtctgttctcggtgttattgctgtgagaagataattgactaaatagtggaactggaatgctatagaggtcataacacttgtctccttattgtctggtgtttcagctatctactccattatgtgttatcctccttggaatacgaaagtgtgtctatccagtactatggatttgcccttgcttgtttgttggtagctctaatcgccttcggtaagacccaaaactcatacctgttaaacacacattccttgaaaggatttgattgctcaattgacaacattgttttcttcctaggaagggtttacttgggtatgcatagtgtcgtcgatatcgtcagtggtcttgccataggagtcctgattctaggtctttggcttaccgtcaatgaaaaacttgacgatttcattacatcaaaacagaacggtaagctccttgctcatagtttgataaagctcctaagttgcaaacattgaataacagaaaagccatgactctctggattgtgcagttagctctttctggaccgcgttgagtttcttattgctctttgcttatccgacccctgagcacccaactcctagctacgagtaccacacagccttcaacggggttaccttaggaattgtaagcattgaaagattttcagacgatattgtatgcactagtgttatggtttatttagacaatggccttaatcgatgtttttacttgtcttaggttaccggagtgcagcaaacgtacagccaattccaccacgaagctgctccacgaatcttctcaccagagctccctatttcatcctaccttggtagagtcatggtgggaataccgacgatactcttagtgaagttctgcagtaaatctcttgcaaaatggactttaccaatggtatccaacgcacttgggattccaataagatccagcatgtacattcccaagctcaaggggtatgcaagtgggaagaagacagacgaacccaagaattcagttggatatttgcagaaactatgcgagtttttgagccacgactcgtttgatattgatactggtataaggttcttccaatatgcaggccttgcctggtccgttgttgatcttgttccttcactattctcttacgttaacttgtagtaacagtttcattgtgtgatatataaaatcagtgcctttacatgacatagttcatcaactctgtattcacttgaccattcacaaagtcttcattgttgtggcttgaaagaacagcatttcgatttatattattaggtttcaaataaaaggtgcacgaaacagatatatggaacaaaagggaaaaattacgtgaaataaatcgaaaaaatatctcacaataaacagattctgatgcagaagggagctaataagttcagccaaacacatgttcatgagaggttttaaagttcattgacctctttgcctatattacactattccaagggagagggctaaattgattttaaagagaagcaacctggaacacaaatgcgttgaaccaaatggaataagcagagatcttcaaaaaccaacaaccggaagctgcaggaggagctgagtatcttcaaaggaaatagtcaggtgtccttcgggttacatctggctctcctctcctcggtgctggttcaaactgtttcatgatttagactctgttagttacctttccccagaaaagaagttaaaacaaagatttcaggaaatagtttgggcaaagacctgaatgaacgtgtggttcctgcagtcatcgacctcaagaattgaggccatgtttccacagcgatagcaatagtttggtgcactgaatatagtaaccactttttgctcctgtcaacgagaatatatacatgtgagctaagaatctaaggtttggctaatctatgcagggaagaggagtttgattgtattacgtgtgcccaattgaatccatccataacgagctgatgcgctcgggcgatcagctttaagttgttagtgtgattgaattgttccgaaatatcctatggaaacaaaaatgaaaaaagaaagtcaattacaaacttactagaacaaaggaaaaaggagattcaggaaagcttctgaaactgaggcttcataattcaaatacctgaccaaatgtatatccagcaccacgaggagagattccccagccacatctgtcatcaggatcagaccataataagtcacacataggcccttcatgtggaacttcttgaacccgatcaaagttcctaatgttgtcaagggtctcgatggatggtgataatccaccgtgaaggcagaatatttccgactccacctgtaaacaaggatatacgatatgagatgaacagctcattatttttcggaattaaaactcttaagaaatcgtcaattcaattagacgagttatatttaagagatcgtccgcatttctctgtagaaggtataagtagcaaatgcaatttcttttgtcatttacaacatttcagaataccaaccatctcaaactgaagtgaaacttacgctaacacacgcacaagaatgcacaagagaaaatggataatctatcttataggaataaggaaataaagatgcaatgcatgtactaagtactaaccaaggctgtcagtgggaaatagtcaaagaggtctgtaaatatcttccaaacatttgcattgccatacctgcaagtacaagcaagctttgttaagcaaattacaaacgaaataaccaaaaaaaaaacactttcctacatgcatagaaggagacatatcttatcaaattcatttttgaatggcactatctaacaacaactaaggtacgaaaaaatgtcatgagaacacagtcacatgagcaaagcaatattaacccggtagatcaatataaactagccaggactagaataaagaaagaaagaaaattagcagcgacaacagaaaccatgaggacatgcatagtattagttaaagaagtttgtcatcacatgaacaaagcgagtcagtagcttatacaacataagaatgtttgcagggaaactcactttcgcagacattcatcataaaatccataaacctgagtaatctgtcaaaaaaaaagggtattgaaccatgagtcagataaaaacttgggaggccagaaagttgcagcagataagatatagaaattccttaattgacttgtaaatatatatatcatcgacatgaaaaaataaaattgtaattataaaagggtttcatcttagattttaatgacagaaaacagaaaactatgcctatcgactcaatagcgtatacttcagaaggcaaaagtacaagtagagacaaagtgataacttagagaaaagttagtttacctgacgactttcatggtttcctctaagaatagtgattcgctgtggataccgtactttcaagccaaccaacagctggaaatgaaattaaagaggaagaaagagaaacaaatataaacgttaagaagagaatacatccagtatggagacaatgtattttatttaacaaaataacatgaccaaaaatatgtatttccacttgaaatcagattattgaacaaaaaagaagtttgtaaatggtatagacttggtaccgtaacagtttccacagaataatatccacggtcgacatagtctcccataaacagatagttggtatcaggacactgcaaaagagtgtaagattaacatttaatcaggttttgtaaacgcctgatggtagatggacaccaaaaattagaacccactttcaaatataacccctaagaaaaggctctaaatagttctgattattcagttagaaaccactcacactttgtagtccccagccataaataataattgctagaaaggattgatgcagactaaataacaaaacatgcatctttatgtccattgtgcaagagttatagatgttacctttcccccaatacggaaaagctctgcaagatcatggaactgtccatgaatatcaccgcagattgtcacagggcttttaacaggctgcatacagtaagaatataaaaattaaggctctttaaaccaaatgattgtttagttacacaatctaccacatgggttttataattggcacgagatgcaagatcaagaactgacctgaacgttgctttcatccattaagatctccttagctttctcacataatgctctgacctaaagcaaataaaaaaacactgcacataataaattcatctttcccctcttttacttcctagagaaatacaggactaacagtattatccagtttaacattaaaatgtcaaattagatacaccaatttgacacaagcaacaagcacaaagatcatctacagccaagaagacttttttacagctactgatcagtttttccctcgatattagcttagaagaacttttatcgaattgcaacctctctctcaacttcagctaaatctattatcatttaagatacattcccccaattggaaaatccagtaatgcatctaactgatgagattttaactagccaatcacctaatcaaaaggatacaattttggctgtgggtgagacaaatccacaatacaaagcatattgaaatgcgagctaatcgcctattcagaatccaatacagccagaaatcattaagaaacaaaaaaaaatgaaatccatttctatcaacccgtaaaactgacgtgaaatgagctctacacctatactagaagatccttctcgaagaatcagatcatcatatactcacagaaataatccacccttgatttgaaacaaaatctgagatctaatcaccgaaatggcccaaagttcactcgaaaaactaaattacagatccaattttaaacgaagaaaacgaaaaggtgcgaggaaagctatattctaacacaatcacaggcacctgttgctcggagagaggcttgcactgcatgagctgcgagatctgctcatctagatcgagggttgcatccgttggaagcgaattcgcgcccatgtttttggtagtgcgtcgtcgtcttctttccttcaagtcggatccggaaaacagatcagaaacgaggcaaaggtttccagattaggggcagccctaaccctaaattggatggattctgcgtattcttcgcttttttctttctctctctctctcgccttcgtgtgcagagtgagagaggaaatcaaaacaaaggggcgcgtgaggtaaaggggcgagtgggtttgtagctttcgagctgtgtcttgatttgaccattatatcctcctcgttgagatctaaatgataaattgactaaaacaccctttagttttcttataaaagtgtttaaataggtaatacacacaaaatttgtaaagtagttttatttcttttaattaaacacacaaaaactatataaacatacaatacaactattgttttgaagaatttttcatttttaacaaacattttagttttttctcaaaaaactataatctaagtaaaatgtgtttacataagggtctagctatgggaaaatacattatcaactatttattcatagctaatgaaatgtaattttgatttagccaaaacatcattttaattaaaatttgaatggttacaacataaaattttgaccaaaatttatgtgacatatatatttttattctctctaatgatgcatactaaaatttatgaacgatgaatgtaaaatacaaattgatttgctccttcatgaaaaataaatttaaccaaaaaaaaaagaagaaatctctaattattgacaattcatgagagtccgaacataaaaataatattcaaaatataggttcatgaaagatttagattactctatttttggaaataaatatggtttgaacttttttttacatataagttgaatcgtttttaagttagatacaattaaattcagaataaacaattttaaagttctaaagatttaagtgtaaatttgtttccccaataattattgtatatatgtttttctcaaactcttatgagtgtatataattagattttaaatcaattcttaaaatataaaacaagctaatctcattatcataccatatttttggcttaaggtcattttgaagattaataacatgtctattttatcgcgttgtgtccgatccagaaggtaaacatcgaatttagggtttttctctcccccgagcttgcttttccgttgggtgaacgactaccgttgattttcttcgtttttttggataccgattcgattctctctcaccgatttttgaggttctttctctatatcctctcgttttttgtttccgcctacgtttatctctcgatttcgagctgtatcaactagctagggttccttaattggtttatttcgtttgaggtgatactcctttcttcttctgtttgcgtgatacgattctaatttgcttgcttcgcttggcgttccctggctgggttctctttgtttctcttcgtcttggtagatttgatttcggattttgggggtttcctgcttatggagttcgatttttacattacacagctgctattgtgatttctatgattgcgtttgtgctaactattgacctatttggtatttgccaggttctctatttttcgtggataagaagataaagttattgtttattgataagttttctgctgggaagttgcaactttttctagatttaggacgttacaaatttcaatcatgagtgcatcatgggcagatgtggctgattcagagaaggccgtttctcagtcaaagcctccttatgttcccccacacctacggaacaggccatcagagcctgttgctgctcctttgccacaaaatgatcatgcagggtatggtggtcaaccagctgggtctcgttgggctcctcctagcagtgggggtggtggtgccagcggcggtggctataggaatgatggagggcgcactggctatggttatggtgctggaggaggaggtggtggtggtggtggctggaacaacagaagtggagggtgggaccgtagggaacgtgaagtaaacccatttggagatgatgctgagttagaaccggtctttacagagcaggagaatactggcattaattttgatgcctatgaagatattccagttgagaccagtgggggagacgtgccccctcctgttaacacatttgctgacatagatcttggggatgcattaaatctgaacatccggaggtgcaagtatgtgaggccaacaccggtacagcgtcatgctattccaatactgcttgcagagagagatttgatggcctgtgcccagactgggtctgggaagactgctgctttttgctttccaataattagtggaatcatgaaagatcagcatgtagaaagaccccgtggttcacgggcggtttacccttttgcagtcatcctctcaccaacaagggaattggcatgccaggtaatatacacaccaacaagaatagagtttcttcagaaagaaaaaatgtacgtgtatataatatacacatttctcattctgtgattttcttgcagatacatgatgaagccaaaaaattctcctaccaaactggtgtgaaggttgttgttgcttatggaggaacacccattcaccagcaggtaattatcatacacttttttgtttattggtttttagcttgtcattggagtttggattttgctacatgattctagcactgttttttgttttatgtgagtagcagctttcgcttactgatttgagttctgctagctctttccttcccaatgccagtctcctttgtcaacatatgttctgattttgaagtcagcaatgcataatgttggcgaaaatcaaatcttgtattacaaattttttcatatgctagttaacattgtcgtatcgcttgtatcatctttacataacatgcagaagcattggaatttttaatccttgttacaggtgttagttagtcaaacagttttcaagcatcgatttgttgaccacatattttattgtttattcagctcagggaactcgagaggggatgtgatatccttgtggcaactcctggccggttaaatgatttgcttgaaagagctagagtctcaatgcagatgattaggtttttagctctagatgaggcagacaggatgctggacatgggttttgagccacagattagaaagattgttgagcagatggacatgcctccacgtggggtgagacagacaatgctgttcagtgctacatttccaagtcagattcaggttggtttacttgtccatgaaacacctttttcttgctcttaaattctattctagtgaagtagcatggtaacaaagaacaggataacagtgttcttggatttatgtctgtaactctgttccttcccagatcatgaggtgaatctttgatgatttagtctttagagtgttatatttcttatgtgagaacagctgcataatattcagcacgcacaagaatgattggttcttaacgtttcttttaatattaccgtatttgtttcctgtgcagagacttgcagctgatttcatgtcaaactatatatttttggctgtgggaagagttggttcaagcactgatttaattacccaaagggttgagtttgtccaagagtctgacaagagaagccatctcatggacctgcttcacgcgcaaagagagacccaagacaaggtaatgcattatttaccatctgttcacttatccaagatttattatcactgaagctctgactaattctgcctttcttcactttttatacacagcaatcattgacattagtttttgtggagacaaagaggggagctgatactttggaaaattggctgtgcatgaatgagtttccagcaacctccattcatggcgatagaacacaacaggttcgttgattgagttaagttgaaatttggataattgtgcacactaaagctaaaaccaaactatagaaacaacctcgatgatattactgaaatgaactctttaaagatcatcatcagtaagttgttctctgttgactcaatctgattgacttctttatgttgttatgaattcaaaggaaagagaagtggcactgaggtccttcaaaactgggaggacacctattttggttgcaacagacgtggcagcacgtggtcttgacattccccacgtggctcatgttgtaaacttcgatctaccaaatgacattgatgactatgtccaccgtatcggacgaacaggacgtgcaggcaaatctggaatagcaactgccttcttcaacgagaacaatgcacaactggctaggtcgcttgctgagctaatgcaagaagccaatcaagaggtccccgagtggctcacacgatatgcttcacgtgcttcatttggtggtggtaagaaacggtctggtggtcggtttggtggccgtgacttcagaagggaaggctcttacagtagaggaggaggcggcggcggcggaggaggcggcagtgattactatggcggaggaggctatggtggtggtggatacggtggtgctccaagcggtgggtatggtgctggagtgaccagtgcttgggattagccaattaggctccccaatttttcctctttttaacctgactatttatttcttctcttctacattcccaagagagcacgtgtatttgcccccacctttgagatctctcattcaagagatggatttaactaatcttgctattaggtggatctctctgttttttcaggctatttttaggatttgtcctaaaagatagacagtagtttttccgattttgatcttgttcttggtttcttctaacaatttcatttgttagtttgaaatccaatttgtctttttgtttccctttgttgttgacaatctttcttggtgaaatacaatctctctttatatcattttaaggactttgtgcttacattgtttaaactccgttccgttacttcaaaaagataaaatgcaggtacataaattgttgctctgtgtgaattaacatacaacaattagattcaacaactattgctattcagcttcagaatcttcttcaagctcacttccttccacaatctcttcttcttcagagccttcttcctcaaggtcatcctctggcctatcaagcaaaagttcctctttagagaccatgcctagccctctcgcccgataaagaaaccctgttctcatcacatgataaaacttatctcgaagacgagtgagaggatgcggatccactagttttcctcggcgatacccttctttgaggatcacagttgttgtcttacacttcaatgagaggtagaaaatgccggggtatcgcgtgaatagacgagtgaacttgtgcggaatgttgagctccgctctcatgcttctcaagtagttcctcttggttttcttgtggatagtcaagctcaagagctcgtgcaaaacagccacagctcgtttctccatgagatcgctttccggatcaatgttactcgggtcatcgtaaggagatatgtagggaagtttttgaaactcatccatccatgctttgaccttcttctgtgctccatatcctctagggaaactcataggaaaagtcaacgtagactgacctctcttgaactcgcggtatctagactcctccccggaaacatcattgtcctcgtttcgcttctgcagcgccgagaatgcgaactcatcacgccattttacaagctttaaacacgggttaccattagaagccttgacgaagcagaaatgatcagggtatttcatgactagcgtcttttcgtagttatcgggtaaaccgagatcgaatttgagagaatgtagtgatctaagagagacagtttttgatctcatcatcatcagaactctacagagtctctccactgtatcagcctcgtggctttgatgaataatctcttcttgtgagtcaagcattagtgctgtgtccgttagcttgaaacatggtaagcttgcgtaacgagcatgaggaaattcgtgaaacagagtcggatacctgcaaaaatgtcaagactttcattaccattcttacaaaattgatttctttctaaaccgtttgttccagtaacaattgaaattttctctgattgtgatacctgcgcaagaagcggagaacagggacggtgagaccaaggagtttttgccaatcggcgacggattttgcggtgaggaaaccagtgggagatcgctttatggcgtctttgaggatacaagctgctttgagatcggtctcagtatcaatgacgtgatccaggttcttgttcttcacccacttcagtctcacctttgtcattgcacccattcctcgccattgttgatgctggtgaaacagcttactcaccgaaaagagaaagctttgtgatttgacgaacatctaaagagatttgacgaaagcgcgaaatgtggatgatctgtaattgagagtgcaaaatgggtttagggtttagtgttctctcggagtttagttaggacttatcattgaaagaatgaatagagagaagtaggggagagtaatgcagagaaggtgctcgacgaaatgcctgaacgaatctaaaagcgagatttttcgacttctaactctaggcccacaggctacagtcaaagtaagccttttaagttggttcgcgatatgtttttgcagacagaacctaaaaacttggaacttctttttatctgcggtacacagccaaatttgcaaaaataagttccaacgcgtctagactcgattcgtgcgactcgggaagactaggctcgtttaaaggttcacgcttttgatatttcgagctcctagagacctagactctagtcctgaggctgattggtagaggaaattggaaaagcttggattgaaaactatggaagcgaagaaagtgacagaagaggaagaagagacgtggaggagagagatagtaacaagcgttatgagattagtgagtacgagattgcctcagacagatctaatttctctacttctggttagcccatggctttatcgcaccctcatctcctatccttcaatctggctggtaactaaactttgacttcttttaagtctttccaagttttcaaaaaaattatacttatctgattcaaagtgttgattgttccctttcagaccatcaatttgcgcgagatgaccaatgcaggggatcggcttttagctgctctgtccttggttagtttacaatataaaaaagtttgatactttgatactggactgtgcttgaattcaacttgttgtgagtgtttggaaagtttgagcagaagtcactcatcatgctttcaaatcgtgtagccaagatatcgacaagtgaagcatatcaatcttgaatttgcccagggtgttgtggacagtcatcttaaacttgtgaaaaccgaggtaaatgttttgtagattctaccagttattagtaattacatatggcttttatgttttctgaatattcgtcgaattcaagaatatttgactttgtttgactttgtggatcgatttcttacaataatgtactggctgatttatgaacattttagtgcccggatgctcttttgagtctagaatggttgaatctgaacgtgtgccaaaagatatcagacaatggaatcgaagctataactagcatatgtccaaagttaaaagttttctctatctactggaacgtaaggtgagattctgtcttactcatttgtatcacacttcttgattttatctcctcagacgagcctaatgctttggtttatttcacagggtgaccgatgctggcattagaaatctagtgaagaattgcagacatatcactgatttgaacttaagtggctgcaaggtatcttaatctacatttttggagtcttactcctgatgggtggcgataattatggcaatgtttaacacacatggacaccctttctcttctatgttctctgtttgtaatggatgcgaattttgatttgaatgtgcaccaattgatgcagagcctaacggacaaaagtatgcaactagtagctgaaagttatccagacttagagtcactgaatatcactaggtaagttaaatatgttaaagtctctgtggttatttcaaagtgatagataatccacaacattgttggataatatcattcttcgttttttgattgttcataaagatgaaagcatgatttcagttttccatacatttttattgaatacttttggtgtttattttttttgttcacgatgctgctaggtgtgttaagattacagatgatggattacttcaagtgctacaaaaatgtttctctctccagaccttaaatctctatgctctttcagggtagataagcaacatagatctttttgtttctggctatattgtaaaactagctgttctaagttctggaaatgatattgcaatttctttcagcttcacagacaaagcctacatgaagatatcacttttagctgacctaaggttcttagatatatgtggcgctcaggtaggagttggtgaacccaattcatttagttgcattgtctttctcctttgtggatggatgagttttatttgagatcttggatatctcttactactttgtagagtataattaaagaattgattggtagcaaatccatagcacagactaaatactttgattatgcttttcttatctttgatatacacctgcaactgatagtgcaattttgtctgttagaatatatctgacgaggggattggtcatatagctaaatgcaacaagttagagtctctcaacttgacatggtaagataagtcctccactaattataaagaaaatgagcaagaagctgtgtcttcatatctaaatgctttaacgcaattgcttcttaaacatggcaggtgtgtgcgtatcacagatgcaggtgtgaataccattgctaatagttgtacctccctcgaatttctcaggtacttgatccatttctagaactatttgcttggttttgtcaatgaatctttttgctgacaccgttcaatgaaaacataaaactccagcttgtttgggatagttggggtgactgacagatgtctggagaccctttcgcagacatgctcgactacactcaccactcttgatgtcaatggctgcaccggcatcaaggtgaccttttctatatacgaaaattcaattttctagtttgtttcctctccaatattcaagtttctatgtagtgggagacactcgagaccaacactttcctcttaactattgttaaacacatggtaaatttgtgcagagacgaagccgtgaagagttgcttcagatgttccctcgtttgacatgcttcaaagtacacagctgaaatttgctcatataaattagaggactctcaacaaatgtctatccttcagttataaatttgctcatataaattaaagtctcaaaattttatttccatgtattttgtatgagtttccaagcctaatagaaaatttattttttgagcaataataaataggcaaaaaaaatgagaagcaaataggataagtccaatcataatttacctatacagtgctactactacgcgtgtcacgtattggatgccttagtacacagtaacaaaatacgccaatgcacagcagataaatatttggccaccaaaaatatctttttttttgttgttaccggttatgtgttgtagtatttatatataccccccttgaaccggacatttcttcttcttcttggcgctcaatttcttcatctctggatcatctctctctcaacaaaatccaagtttcgaagcttttattcacatcacgattcacgaggtactgttcattactcgattttctccatcatcttcttctttcttctatggtaatttcgtttgcgcatgtctccgcacctttgtcatgctctatttcttctttttcttgtttcgattcgccatcgagaacttcttttgatgttttaagttgaatttagctttgcttgtttcaagatctgcgtcaatagattacagattcggtctcgaattgtgaattttgtttgatcttcatgaggattatgtttagtagaaactagatctgcggatcagaggtttagagtttcttcttgttggtaatttgattttttaaaatcttatgatccccagatccagtcatggcgggtgcagtagcaaggtttgcgaaatggtttggtgcaatagatgtttggactcgagtatcggtgataggtttaccagtcgcattcggcgtattacatcaactagaaaaggaaaatgttcgtcaaaagaagctttttcaggcccagattgatgacttagtggctaaaggagtcatcagattcattgaggagagtgagtgagtaatctgtagcagatttttaattggtgatcatgtccatgtttgtcaagtgttattttaagctttctttttctttctttcaatgcgtttccatgaaactaaatagctgtttttgtatatgatatgcttcaaagagttcttctaatcgcattctatgatgcttaagagtttctcaataagttcttattaataagccatgatacatctgcttcagctagtagatatgactcgtataatgattttggttattgtgttcatcaactttagatcacagaggattttacattatataccatattgagagagcaccagccatcattaaaccaaattgcttgttgtctcttcctttgatgcttgagcttgtggagaccgctgcaatatttttattcgttttcttttagttccgagaaaaacggaaaattaatgtttgcacgaatagaatcaaaaactgtaagaattgttattagtacctttatgtccaacagtctgagaagaagattcagtgaattgcttaaatatttgagaggctggtgaatctggaagcagatgtagaagatcttgttccaaacaaaatgaaacaatgagaacaatctagtttgtgaccatgcaatactttttcaagccaatattgtagaagatatgaaatctctcacctgggcattgagagatgtttgcagggacatgacaagcggaagggaggctcattgcacggttggcatcaactttgaaccccaaaccaggatcatccctgtctttgactagagtacatagacatttcctggtctgccctttgtctatttttaccttgagtgtgctgcaacatgttgagtctggtgctttagctttgttagtgacaaaaggaagacaagagtagagatcagacatcgcatcctgacatccctttatatcctgactcaattctgatctcacaccaaggaacattactgctactgttatgcatagagccaacatttgtggattttgattgtaagccatgaatctagccatcagttaatgcagcagagtaagaacttaatgtggctttttataagacttgtttcttgttcacatatgtttccctctctagttatagggatactcgagagttctaagtctgcaagaaacttgatttaaaaggattatataatgagtactggttaacatgtctaatttctgaattgaaatttgagttttggaatttggatcatcttcagttattggaggggtacatataaaatatatcaagttgttcacagttcgttttcacagtatctgcaagatatctacaagtgaagagactagaaaattgatggttaagctgtagggttaagagtgtaaggaggattgcaaccatagaagacacagattttaatatggaaaaggtgaagtcactattttcttgaagaatctaattgtttacattgttacaatcacaagccagtgaagacaaaactttctggcaaagaggaaataactatagaaagaaaagccaagcgaaccaagcagtaaataaaactgtgatacagagtagaacgcaagcgaaaaacccagcgggagaaaccccagggacatggccatgctatctacttcatgtagcttaaccatatccattggaaccagtctttggtatcgggttattacagctgcagtatctctataaaatattgtttcgtctggccctgggcatgcagcgaaattcagccaaaagtgcaatgtgatcagaagaccattctggagatggaagagctgtgtccttcctcaaggactcttcatccaacagttccaacaacgattccactgttagcgtgtccgctgaaacaaaacaaaaagcaaattgcttaccagatgaaaaagaaatctgagatgaaagcaaacactggcgcgtaaaacccctgaaagtaagcacttaagttaacctgtgtaaaatatgtaatcaagtgtgcctataaagtccctggtacagttggtaaacaacggttcacttgatgcaggatccagtcttctacgttgctgctcagtaataacgttgcctcccatttttgcaaattgtgagtaggcactaacctgcaatggtcacaaaggtatgatgtctacgcatatgttgccattctaattaaaattgaagtctgcctttcacgattctgtgcatctgttttccatttttgggaaagataattaccagtggcagctgatgagtaagcttgctgtgaggacgtaaaattccaagaggatcaaccatcaaatctgggtgcaatggatcgacctttcccacagcaagaagtgtatgaggagcactgaaaatattaagaaggaactccaagttaattcaggtagaaaccacaatcataatttaatatagagtttgacaattgctacttgggcataacaaataggaaaaccagccagacctcgcaggtactgtgttgaaatctccacacacaagcattggaatatctgcactggcagctattttctccagtcccttcaataatgtgtgaacctatttgggcaagaatcattatggatcaatagtgatgtaagaatccgaaatctgagagttcttttacaatgagaaataaagaccaacctgccacagctttacatctttcaattcatgaggaacgtttacatgcgtgttagcctgcacccatcaaatacatgaaaagagagaaaacatgatcacctcgagacctttaaaggagaagaggaagtggaaacacataacttcaactctagcatcatctctgacaataaagaacaatattgaaaagatggacaacttaccacacaaagtagctggcgcttcccaggattgtcagcagcctggctaccgaattttgcttccagtacaactattaaagcaacattatcctaaaaagaaagactctaaatcagttttacatgaaaaaatatcaccaagaatgtgcggaaaacagaaatcatactatagagcatctcagagtaccttgaccaaccgattcaaagcatttttcttctgggaaacagggataatagcctcagtcaaagactgtgcagccttgttgaactcaacctggatgagcagcccaatgatttagcaaatgggcctaattagataggtaacaggagaaaactaagacatacctcatatttttttacatgtgagaacctgtctcttctgaagaaagtagcgcacccatcaattgtgtttgtattaccgatgaaaacctaaaattatccagtgaatcaatattttctggttggtacatcttgcagataagtgaccacgaaaaggtaatggaagatcaaggggatgcgttgaagcaaacctcatttgttttcctcttaaaaagaccttggtatccgtgtttatccagctcaggaagaaaaaactcctcaaaatgatcattctgtacctgcaagatgaaaaacgaaaatattggagaggtatttatccattaactagcaattgaaacgtttccaagtcagtacaacttgtgccataaatatttaacatacctcttgtagacaaactatatctgcacggtacttgacaatttcccgtaacaaattctgtctacggtatgtccaagcgagagcccatgtggggcagtaactgtatatgtcgctgctagcatatgtatcagacaatatattgtaggacagcacagtgaatgttcccatagacaaaggccgcccattagaatccaggtgcccagtaacatcagttccactaatagagatcagcctacgcggagaaggtgatggagctgggataacacgggaagtcaatatggtacaagaaaggcccacattctgttttgtctctgcattgactactacacattcaaacttcaaaacatggcaaatatcatcagccattggtgtgtatgtcttagagcgtccaacctcaacaagtgtttctcctccggcgccggtcttttgagttatggctgaaggataaactgatgatgacccattcgttaaactaacactggtgctgagaacaccagatccagaccctgagctattcaaacggggcaactcttcttcatcatttccttctgtagcagcactggcagcacgctcatgcaacacacggtgatgttgccacgcatccgaaaagcacttagtagagcaatggtagcttttggcaacaggaactttagactttagacatcccagacactgcaatgttgccgtctcggatggatgcacactacaaatcgcaactttcttatcactctgtactcgaaacctgcaacagatgatgcatcttttaatacagaaccaaaagacaagactggagacttataaaccctactttacaattaaagaaatcatttttcacactcaaatttgcaaacgaacaaagacttgaactgactaagaaacacttaaacaaatcatacccgggaattcacagaaaagtctcaaactttcggtaaaaaaaagtcgtccataacaaactcgagcaaaagctagtaaaagggagcagatttaagagtaaaaggaagccacaggcatgacttaccatctgtactttaagaagtgaccttcaagcggggctgactcaggcacatcatcggtggagggggtcttatcaggccgccggagaagtacgtaaggtgtaagttcgcagccaacaataggaatctccgacggtagatgcactcgtataacgctaagcattgcttttaccgtaactaagttaaattctgaaagcaaaccaacactaacgaagcccaaaggctgagatttttaaatatatatattgagacgagagagcataagatataaaacggatcctaatggatccgtcatttacttgaccctaaaactcgacagcatggatgaaccctaattttcccagaaccctaattttcccagaaccctagatttacccccaattttctccaaacccgaattttacaacctaaaatttatgaaattgaaatccaatgagtgggatagatttgttcgctacgactaaattaatttccaaagatggacaaagaccaaagaaaaatacttgggttctatattcactgttttagcccattaaaatttaaaacctaataataataataaaagtttaatttaattataaaatctaatttgcctcaaaaacaaaattatatatcgatttgagtttatttgaaaaaatcatggtttagattttacaattaaacaaggttaaatattgatttgggtttagaaaatacgattagggtttagattttatgattaaacgagattaaatatcggttttggtttagaaagtacgattaaggtttagattttatgattaaacgggttaaatattggtttagatttattaacaggtttagatttaacaattaaacaaggttaaatgtcggtttgggtttagaaaatacgattagggtttagtttttttacgactaaatgagtttaaatggcggtttggatttacaaagaagaattagggtttagattttgtaattaaacgaaattatatatcggtttggattataattatagcttcaatttattatgtaatttaaataggatttgacatgacatatttttattagttaatgcaaaaggaggtgaacaaagaggttcatccccctaggaatgaacgcaagtctcgttcaagaccaaatatggactcgtatttttattttattttattttccaaagggaaacaaaaagtctttaatactcttttttctatatacacatatattcacctatttataataaaaaagattgaaacttacggaaaatataatacagtacaaactatatatgtcaactaaactaaataacacttaattaaatgatgtatatagattgcataaccaagtatataatattatatagttaacattataaatataaaatttcatgttaaataaccaattaactctaacgtcaaccggtgttaaccaacaaaaatattcaaaaataaatttttactttatttttaatattaaaaatctagttttactagttattctataatcaaaaaacaatttttacatctactataaaaatattttgcatatatatttaatacattgattcttaaaatatttagctttttttaatttcaaaactaaactaaaaatgaaaaaaatgattaaaatttttaaaacaaaaaaaaaactgaaattaaaaccagaaaaatcttattagaaacatatgagtgaaagaatcttttttttgtattatcaattaaaatatataaacttctttattcattagaaaataaatcattacagaaccaaatacacatgactatataagtttcataagaaagtaatatgaaaaacaattgagtatataactttttagtctaaattttgcacggtaatttttaaattcaaagtaaatgttttttacgaataatataagaaaaaactaactattgattaaaaatatttagcaattaaaaatttaacttcttaagaaactaactattattattattattatgaatagttcatatcttaaaaaaatatttattctcttagtttagttttgaaattgaaaaaataaagtaaatattatatgaattaatgcattatatatatatacaaaatatatttatattggatataaatatatttttttgtattttacaatatcaaataacattaatttttttaatactaataattagttttgaatattttgttggtcaatgctgatcaacgctggagttggtcgaccatttaacccgagattatatgtttatgatgttgacgacttgtataatcatacaatccatatatgttaagtagttgtatgttttttagtttacttgcatttgtggccaattgttgagttagctgacaatatttttttgaaatatatgtatgatgtcaaaaatattttattttttacaaattttcattgtaatattcaaattaggtagagacagataatataataatatagatatttagaaaattatgattttcaatggaaatgaaagtacagactcatatttatgacatttgtttaaaataagttggtatgtaaatacttttgctggcaattaatatctaaatttgtcagtaattacttttgtccagaccacaataaatattcgtctctatccaatccttgctcttcgtgtttatcacgcgctatgttaatttatgacgacacacagttcacttcgttatagcaacgccggcacgcttttcgttgttggaaaacggcaaacaatctgaaaattaataaaataaaaaaacgagaaaggcttttggaaattaataaagttcatcgaaatacaaatatctcttcatcttttctcttttgctcatttcccagaaacctttgtttcatttgcttcgtgtgcgatcgcgagaacaagggaaaattagggtttatatcctcaagctttttcgaacaccattgatcgttgatctaagatttttcttctagtcgagtttcttaaggtctggcttcatatctctctgtgcatggtgtcgttaaatctatgcagcgatgtcctgttcgatttcattttgcttctagggtttaatgatttgtgcatttgttcgttttagggaacgattcttctcagctttgtgttacttcatcgtgattttgttttgttactacgagtcgtttctatttcttagattattcgattagctgaggttttttgaagattcttctacagataactacttctctcgaatcgatttgcatttgttcttcatttttagtatttggatttgttgactctttctctcatttcttacatgcatagctgcaacttatttatggaaaacgaacttgttcgaactgatatttattacgatatccaggggctttgatcaaactcaaaattgaagaccaatactttgaaggattctggtaaagctaagcaactatgagttcaaattcatgggctgatgtttctgaatcagagagggcaccatctggtggtggttggggttattctcgtccgtctcgaaccaactatgttcctccacatcttaggagccgtacaccatcttcggagtttgttgctccttcacctggtaataatgatcgtgggggatatggtggtgcaaatagtggttatggtggtcgaggccaaggttatggtggtcgaggttcgggctatggtggtagaggaggtcctgtgggcggttggaatgccagaagtggaggttgggaccgtcgggatactgaaactaacccgtttggtaatgatggaaatgcagacccggctgttaacgagcaggaaaacactgtcattaactttgaggcctatgaagatattcccatcgagacaagtggggataatgtgccacctcctgttaatacatttgcagagatagacctcggagaagctctcaatctaaatatccagaggtgcaaatacgtgaagccgacccctgtgcagcgtaatgcaattcccatattggctgcaggaagggatttgatggcttgtgctcagacaggctctgggaagacagctgccttttgttttccgattattagtgggattatgaaggatcagcatatagagagaccacgtggagttcggggagtctatcctcttgctgtcattctctcaccaacaagggaattggcttgccaggtctgaataactggtataatatcatagtttatatgcatttgttgatcacatgaagatttcatgaaaagacatctcttttatgatttttctgcagatacatgatgaagccagaaagttctcctatcaaactggagtgaaagttgtggttgcttacggaggaacaccagtcaaccaacaggtttctgttactgttttataaatgcttcattttccacgccttatagactcttgtgtatgtgtgtgagagagagattacttgtgcttttccaggctgtaattatactttagttttttggtgcgccttgttaaattttgttctgacagttgctttagctcttagtttggatgatgaaatgtcctggctgttctttgctctgtaacataccattactcctctcctgtatatgtgggtttataataatgaacaattgtgtccttaagatgaaaagctgcaggaatcagctacatttcatgatagtaagtctagtgctcttgctaatttgttcttgttttgctgttgtacagattagggagcttgaaagaggagttgatattcttgttgcaactcctgggagattaaatgatttgcttgagagaggtagagtctcattacagatggtaagattcttggcacttgatgaggcggacagaatgctggacatgggttttgaaccacaaatcaggaagatcgttcagcagatggacatgcctcctcctggtgtccggcagacaatgttgttcagtgctacatttcctagggagatacaggtttgtggaactcgttcacatgccatttctatgttttctccttaccggagaagattctcagctatctctatcttcagtctttcttgctctgttagtgtcttcattgttatgggactacgttatttgggtcttttgggtctccagtacaattgttctgagaattattatcttttaaatcaacttggataaatctgaccgagcacttatccttaacttgtgtaaatgatctgatatttgcatggagtgaggaagaatatagcggttcttatgttagtgatatgaaagaacaagatagcgattcatttcaatgaaatttaatatacttgggagtaagagggaactaagggtagctgcttgttgtaggtccgtgattgttctataactgaagaaaagagtgagatttggtaggtctgggaaatgagaaggatgatcggtacataatcttgttttcctttattactggagggttcaattcgttgtctaaataatgtttattgtttaagttgacactaccaaaattttggctcttaaaattacaagatagaagttgcgtactgtgcagcaaaggaatcttttacattccatatgcacttaattatgattttgtttttgtgtgcagagacttgcatctgattttctttcaaattacatatttctggctgttggaagagtgggttcaagtacggatttaattgtccaaagagtagagtttgttcatgattctgacaaaagaagccatctaatggaccttcttcatgcccagagggagaatggtaaccaaggaaaggtaatttaaatcaatatgattggtttcatggttaaaagtgaacatagtcagtactattgctcctttcggtttcacgattctgtttcattgtctctttgttctatttgatgcattgttgttcaagagcacctttacaatccaatttattttattctacagcaagctttgactctagtttttgtggagacaaagaagggagctgactctttggagaattggttgtgcatcaatggtttcccagcaacgaccattcatggtgataggtcacaacaggttagtgagttgttgatatcaaaattaggatattgtagagtattcttcagtgcaaccaaagctaaaaccttattgtattttttatgcatacaaggaaagagaagtggcactgagatcattcaagactgggcggacacctattttggttgcaaccgatgtggcagcacgtggtcttgacattccgcacgtggctcatgtagtgaactttgatctaccaaacgacattgatgactatgtccaccgtatcggacgaacaggacgtgcaggaaattcaggactagcaactgctttcttcaatgacaacaacacaacaatggccaagccactggctgagctaatgcaagaagctaaccaggaggtccctgactggctgactcgatacgcatctcgtgcttcatttggaggtggtaagaaccggcggtctggtggacggtttggtggtcgtgacttcaggagagaatcttttagtcgaggcggtggtggtgctgactactatggtggaggtggtggatatggaggcgttcctggtggtggctatggagcaatgcctggtgggtacggacccgtaccaggtggtggatatggaaatgttccgggtggtggttatgcaccttatggtagaggtggtggtgcttactatggtcctggaggatatggaaccgttcctaaccaagggtatggtcctggagtggctagtgcgtgggactaagctttaacttcaattcttcaagaaccgattatgttctctttctctctcacttatctctattgtttattattagggagcagccacagatgtgtatgtttgctctttaaatggttatgtagtagacacgaatcgtctctttgttcaatgtgaaaaaagaaaaccccctagtagacccatattattctcatgagctatttagtcatacaaagcagttcaaacattaaaattgatccaaggaaaagaaaagtcaaagggttttcactatattgaggatcaaaatgagatataaaaggaggtttagacagagccacacaggggtcataataaagaatgaccaacttcatagagtggtttgccttactcagaatccctttgaatctttgtgtcatctctatcacagatttggtaaaggtttcgtctaaacagttgatgtcatagtctgatcaaagaagaagatcggaacaaaaaaaaaaaacctatctgtaagcaaatgatggtgggtggtgaaggcggttaaccgcgtcttgtcctaggcgtgcatcgaaattcagctaagagagcaatgtgattagaagaccattctggggaaggaagagctgtgtcttttcttaatccatcttcatccagtaattccaatagagattccaccattaatgtatccgctgaaacccaaacacaaaaaaatcttccaattaagttaacttgttatttctgatgtagttgaaaacaaggacaatggagttaaaaatggtgaaacctgtgtagaatatgtagtcatgagtgccgatgaagtcccttgtacaattggtaaacaaaggctcgtttgtattaagatctattctccttctgtgttgttccaatccaagacccattattccctttctcacaaacgatgagtacgcgctcacctgaaaccaattcatttatcaaatatccaagagagacgcaaagataagcggtataaatttacttaaatcgaaaaaagcaatgttaccagaggcaattgatgagtcaatttggtgtgaggacgcaggatattaaggggatcgactgccagatctgggtgcattggatcaacctttcccattacaagaagtgtatgaggtgcactgtcataaaaatgccaaaaagaaaaactttagctactcataagagaattctgcatttcatgtatcatgtcaaaagaatttatgaatcaacaaacctcccaggaagcgtattgaagtctccacacacaagcataggaatatcggcactagctgctattttctctagtccctttaataaggtatgaacctaaacgcaaaagaataaaagaaaacatgaggtgaatactaattctttcgagttcaatgaaatttgatttatttcggatatagagatacaccaacctgccagagcttcacatccttcagatcttgttgaacatttacatgtgtgtttgcctaaacaagttgccacaacaaaataagaaaattcattggctttcactaaaagagcatatacagaaactaacagttctcatgagaatggaaaaaaaaaaagaaccagtaccacacaaataagctggcgcttcccagaaggatcagtaggttgattaccaaatttggcttcaagaacaactatcaacgcaatgttatcctacaacataagaatcattggtttcagttttgtaaacaataactctctgataatcagctgtggcccagaaaaatattgtataccatgtcaaaaataccttaaccagtcggtttaaagcagttctcttctgagcctgagggattagagcgtcagtcaaagactgagcagccttgttgaattcaacctggatttacagtccatgaattagtatagagatcttactggatctagcaagtaaacatatagaactgaatacaaacatcatatttcttgacatgcgaaaacctatcccgccggaaaaatgttgcacagccgtcaatggcacttgtacttccgctgagaacctagcaacaagaaatttgtggttaatagattttaaaacataaatcactgaaggaaggagtgtgtggaatcattgaccaaacctcattagtcttcctcttgtaaagagcttgatacccatgcttatccaactcaggagcaaaaatttcatggaaatgatcactttgtacctgccagataacaaaaaaaagaacacattagaagtagatttttcagaattaaaatgctttaaatcattaccaagtccatacgaataacatacttcttgcaggcaaactacatcggctctatatccaacaatctcccttaacaaattctgtcttcggtatggccatgaaagagcccaaggaggacagtaactgtagaggtcgctacttgcagaagtatcagacaaaatgttatatgaaagaacagtgaatgatcctgcagactgaatccgagcatcttgatctaagtgacccatcccatcagctccgttaacagggattagcttacgggggcttggagaaggagcaggaataacccgtgaagtcaaaatggtactaggatgtccgacaatctgtttagtctcagcattagccacaacacactcgaacttcaaaacgtggctaatatcatcagctgttggagtgtacgttttgcaacccccaacctcaactaaagtctctcctccatttttctgagtaatattagaaggataaaacggagctggaccattgttggcaatactaagatttgacatagacccagataaggaaccagcgagagacccagaacccgcactgttattcctgttcaagtcatcatcctcgtttgcgttgttttccgcagctgctcgctcgtgcaaagtcctgtgatgctgccacgcatccgtgaagcattttggcgaacagtgatagctttttggaacaagggatctacgcttagaacagaaaacacactgtaaagtagcttgttccgttggatgcacactgcaaatcgttactttcttatcactctgtacacgatacctacaacaaataaatccaaaaaatgaatctacaacaagatcagaactttacacacaaaaaccatttgacgacctaaatcagaacatctacatgagaaatctctgaattcagatcaaaattcaatctttgataaaccccaattcgccaaatgatccaagaaagcaattagacaaagagccaatcagaaatctaaccatctgtatctcaagaagtagccttcaagaggagcagattcagggacgtcatcagtggtggagttcttatcgggacgacgaacaaggacgtaaggagtcaattcacagcccacaatgggaatttcagaaggaagatgcactcggatcacgctcagcattgcttttcaataacacctggtgattgtcgaagaacactatcgaagcagcagcagcagagattcagaatcgaagcaagaccttgatgatgattattagatgatgaatattgtcgttgataacctaatgaagtggagcgtacgataggctgatccaccatttacttgaaccgaaaacccgaccaatctctagaaaccctagaaaatgtcttcttcagacaaggttgaagatccggcagaaccaaattagaatcgaagaaaagaaaaaaagaaaggaaaatgatggtatcgagaaagcttataagagatgtgagatcttgaaggaattttgtattaaggatcgattctttcgctgtgaatatggaaaaaatcaatgaaatcgattttggtttttttatgtgttttttttccccgagtgggtttaatactaaaactattattttgtgctttgaagacattattatgaaattttataatattttaattgatcttccttttcgatgaaaattttggttttggcgctcaaagattgaaagtttttcgttttatttttgtttatataaagataaaattttaaaatctagaaaatgcgtaaaaacaaataatccacaactaaacatgacttaccaaagacaaatcaagatttatgactcgtaccattacgaaaacaagattggtgacttaaaagaagtgtatttatatctatgatagattgaagaaagaaggaatggtgaagatgagtcaataggtgagtgttcaacgcacattcagtaggagccaggaggtgtagtttcttcgttaagattaagagacaagaaatatcaattcgtgatataattatcttgaagacgatttgttgcagattaaggtagaattaacttcttcttcttttttgttttttttttaaaatgtgagaattacccaagaagagcagcatagtttatcaattcaattgatcttcttaagaattgttgaatttgtcaaattaatgaaagaatcacattttaacattgtcaaaattgtcatgttcattttcgcttttgttttcgttttagctagttcatttggttttcataaatataagcggttcaaacctgaaataattaaggttcgaattatgaaaattttgttggtttttaataaatttaggtagactaaatttcattcttttcaggtttactcaattttaaagtatagaaatttaagatttatatctaacttttgttgtatttgatatgaaaagttatcggtttgtattttaccgaatttagataactatttacaaattattattttgaactaattatagaaaacaaatacaatgcgtgtccagtaaatcaaagttgagagatttctttctcgtttttaagcattcaacacaattttttctatttgttatttcggaggcctgagtccacattttatatgaagcataacatggaaaataataataattattatttttcgaaagcgatcttttccaaacaaagaagcctcaaacactatatacgctacaaaataacatctcgaccttgtaacaaagaatgcattagatatttttttttttaatcaaaattgttgagatgagcaaaagcacagaacgtattcaacttttcaaaagggttgtggcagctgaatattatttgttctatgatggtaactaacaatttgtttattttttgttctttatagtgaaatcttttgatttgatttttctttttgttgttgttagttttgttggaagccgtcaaagacatacaaaaattgaaagttgatctaacgatagaagagaagaaatgcttagaaatggtaaatgagaatctatttaacgagacagtaaagatactaaaaccgctcgaagatatgggtatgaggtctgaagaaacaatcattatagatgataatcaaaagatgattaaagagtatttggaggacaccttcatagtttgtcataaaatatgtaaggagattcaaaagttgggtatttgccctttgtgagttaagtactcttatcgtcctttttctctagagatttggagggtttttcaatatgaattagatatgtaaaccaatattattcaaacatgaggtataatctaaaaaatgtgaaaggaaagatggaagggatgaggagagcaaccttttttattaatgataaaatttcattggaaatgataaacaaattaaattatggaataaaaataaaattattcaaaaaaaaaaagttgagttgattttggttcatttagaaaaccataatattaattcgattttcttttgttaaatatgggccaatttgaaagatcttatttgtaaaataatatgggccagattggtcaattggacagataaaaccgtgatactgtggttgaaccagccggtgcggtctagatcaattatttagttccctggttctgaacttcaaactttgttcttgatgtttataaaaatccgaacttttaaaatttcagacctttattagaactttcttcatgatgcacgaaacttagttcttaattataactgagatcgatctgggaagtactctgttttcagtatccttctgcatgagcctcagctgtggagatctcgccaatcacaacgatcgtgtagttagcttactcaatgtctgcagaaaagctccttcctttgcaaggaccaaagctcttcacgctctctccatcactttatgctctgttcttttgcagccagtttatgtctgcaataacattatcagtctttatgagaagcttggcgaggtatcacttgcaggcaaagtgtttgatcaaatgcctgagagaaataaagtgtctttcaacacgatcattaaagggtacagcaaatacggggatgttgataaagcttggggtgtgttctctgagatgaggtattttggatatttgccgaaccagtcaacagtgagtggtttattgtcctgtgcatcgttggatgttcgtgctggaactcagttgcacggtttgagcttgaagtatggcttgtttatggctgatgcatttgttggtacttgtttgttgtgtttgtatgggaggcttgacttgctggaaatggcggaacaggtttttgaagatatgccgtttaagagcttggaaacatggaaccatatgatgtctttgttggggcatcgtggttttctcaaagaatgcatgtttttcttccgtgagcttgttaggatgggcgcttctttaactgaaagctctttcctgggtgtattgaagggtgtatcttgtgtaaaggacttggatattagcaaacagttgcattgctcagcaacgaaaaaagggttagattgtgaaatatccgtcgttaactctctcatcagcgcatatggaaaatgtggcaatacgcatatggcagagagaatgtttcaggatgcaggttcctgggatatagtgtcatggaacgccataatttgtgcaacagccaaaagtgagaacccgttaaaagcactcaaactctttgtgagtatgccagagcatgggttttccccgaaccaaggtacatacgttagtgttcttggtgtctcttctcttgtgcagttactgagttgcggacgccaaattcatggcatgctaattaagaatggctgcgaaactggcatagttttggggaatgcgttgattgacttttatgctaaatgtggtaatctggaagattcccgcctatgcttcgattatatacgtgataagaacattgtttgttggaatgcgctgctttcgggttatgccaataaggatggtccgatttgtctctctttgtttctgcaaatgcttcaaatgggtttcaggccaactgaatatactttttcgacggccctcaaatcttgttgtgtcacagagttacagcagctgcactctgttattgtgagaatgggatatgaagataatgactatgtcttaagctctcttatgagatcctacgccaaaaatcaactgatgaatgatgctcttcttctgctggattgggctagcgggccaacttcggtcgtcccattgaacattgttgccggaatctatagcagaagaggccagtaccatgaatctgtgaagctgatttcgacactagaacaacccgacactgtatcttggaacattgcaattgcggcctgctctcgttctgattaccatgaagaggttatcgaacttttcaaacacatgcttcaatcaaacatccgccctgataagtacacattcgttagtatcttaagtttgtgttctaagctctgtgaccttactcttgggagttctattcatggtttgatcaccaaaacagatttcagctgcgctgacacatttgtatgtaacgtactaattgacatgtatgggaaatgcggaagcattaggagtgtaatgaaagtctttgaagaaacaagagagaaaaacctcattacatggacggcattgatttcgtgtcttggcatccatggatatggacaggaggcacttgaaaagtttaaggaaacactgtctttgggttttaagccagatcgtgtctcgttcatctctattctaactgcttgcagacatggtggtatggtaaaagaaggaatgggtttgtttcagaaaatgaaggattacggtgttgaaccagaaatggatcattatcgttgcgccgttgatcttttggcaagaaatggttacctgaaggaagctgagcatctgattcgggaaatgcctttccctgcagatgcgcctgtatggcgtacatttcttgatggttgcaatagatttgcagaagaacagagaaacactctcaatgtcgtctcttttcagtagttgaagaaagtagaattggaagagatgtgcgaattttttgatatttatctgatgtttctcttgcaaagctcatatctgtatatggagaaaatgaaacctttagagttttgtctatctaatcacaagttcagagaaataggcttgtattttggaattgtacagaagataagctctcagtagcaaacaatccaaactttgatcagtcacattacttataaaacgatctttgtgtatggtaaaaaagattataagtttaaatcaacccgcagcttggaaatctccaaagtcatcatctggtgcatcttcaacccctccatctttggcttttaggtcttctttcttctcttcttcttcttcttctcgctttgtatctaaatcttgttgttcagacgatctttggaggctgaggcttggcggcagacttgacggggacttctgagcagttgtgacaggggaaagcggtcccggaggtggaggtggcaggatgattgaaggaatggtggtttctattgacttgcctttatcctccaacgagagattgcccagactcttctctaccgtttttgacttgctgtctttatcgcttctctgtttcaatcattttgatgtgaaaaacaaaaagaaaccttgtgggaaatgtatccagacaataactgtaaatcttacatttttgagttggagaacaatggtttctccttcctttaagctgtaatcaacggatgaagtgttctgatagtgttgttccatttcttctgctgttttcttcttgttcaaatacctttagcaaagagagagaaagagagggtggtcagattcaaacatgatttagtttttcgaaagaacacttagaaatctggaagtggaatgttacttcatatggtcatgtagtgctgcttggaaatcatatgcttctgttctttcccggaatccgagtccgataaaagcatgtcgaacacgaccatctgcattgcatcaaagaactaaactcaaataacaactacaagttaacatctctatatctatatggaaagtacgtacctatcttttcttcaacacggagaacaaaatatcttcaagacaaaacagattattttttgttagactagctgcacatcatgagaagagcaagttaagttatgtggtcaactttttgttacctgctactgtcgattactgcttctacaggatgaagttccccctctcttagaaatgcctgagcgtaaagttcccctgtggttttatctactagttttataatgcattcttctcctttgctcaccactttcaaagctccttcccatgcccatttgttcacgtcccactcatctgctctgcaaggataaaatttatacaaaaaaagtatcagctgatgtctatctccatcttccaatggattacttgatgcactttttcaagtatcttttaccaaagaagccaagttgagttgatacaaagcgaatgtaactagataatgaccatcttgatgcaaattaaggttaagctaccattcatagtcatacatacttcacgattggttcaataagattcgttccgagtttctgatcatttgctaagccgaagggtttatcgggaaaaggggttttgtaaaaatctcctaactacatatatcagaatgactgtttctatcataaaggtaagaaagaacctgtacgaagctgcggttttccttggaggtatctgcatacacaaacaaaaagacaatgaagaggttactttgcctagcatccccgtaaagtaacagacacagaagaaagcataaacgataaaataacattgatacatcaagctccaatgttgtccattacgaatgagaattttatagttaaacctaaataacaacagttcacaatgtctatgatttcatcaaggtagccaatttggaatctcatacatcctataacacaatgaccatgtaacaatttcacgagtatctcaaaagctagtatgatttcagagagaccccatcaagatatcacttagcatgatattggttaaaattaatgtactcttttatcacaagccttgaatctatcatacgaaatctccttgaaaagatttttcgctgatagttacatgtgcaatcgatcaccattgcaaatccaaacaaaatttcgagtgatcaagactcaacgtcaagttttcaacatatgcaaattaagacaacttcctcaataccattgcaagaaatctataacaccagattgaatttacgttataactaattatcagatccaaaacatctcctaaaatcaccaagtgaacttgcaaagaaaggatgtaacttgagcataaaagacacaaaactcatcaaaaattataaaatcacatctcatgataagccaagaaaagttaccaaataaacatagcattcaggcacttggaacagagcaatctctatagcttctctctcctcgttatcatcgacattcacaggatcagtggaagacttcttgtcttcctccatagtcgaagaagacgaagcttgatccatctcagaaacaaagaatttaacttggagaaaaacccagatgagactaatcgatcaaacaaacccgtaaatcttaaatgttaagtctttcccgaactgtgattacaacaatctcacgagtcgcgaagacgaagaaacgtagaggtttcgcgttaggtgtgtgtagtgtataccattacttcaatctgagctacttcaaaaccatcagatctaagctacctctgttaaatctgaaccgtctattacgttgactttgaaaccctgatatagactagacacctatgtatcctccaccgctgggaagtcaacattgaagcagttgatggaccaacaccaaccaatagaaagaacgtccacatttactttaatgggccttttaaactaataggcctaggcccattataaatacatggatttgttttattttatttttctcatatctgtctcttggtggtgatgagtaggtaaactgtgtgcgcttattaacttctctcacactgactctgcgaccctaatttgtgagctctcttctctttgcgcagtcaatttgctacaacttagaaaatggcggcggctacttcatccatcgctccttctctttcatgcccatctccttcttcttcatccaaaaccctttggtcttccaaagccagaaccttggctctacccaatatcggtttcctctcgtcttcttccaagtctctgaggtcgcttactgccaccgtcgctggaaatggcgccactggatcctcccttgccgctcgcatggtttcttcgtctgcggtcaaagcccctgtttctctcgattttgagacatctgtcttcaaaaaggagaaagtttctcttgctggttacgaagaggtttatctcatttaccctcttattcatttctgttctaatttgtgcttattctataatcattttgatgtgtattgattttgttagttgttgctaatgtttggtttctgctgatctttgttttagtacattgtgagaggaggaagagacttgttcaagcatctcccagatgctttcaaggggattaagcagattggtgtgattggctggggatctcaggtacttaccttttttggtctctttatctgtagctactgtgcttcttgtttgattgctttttaaattgcttacgttggattgcgaataaggaatcttggttctgtgttgtgatacgaaattggtcagaaaaaggatatgaataaagtgttttcattttcatacttttgatgcatttgagttggtggaatgaacaagattaatatattgtttcatattctttttattcagcatctcttctcttgtaataaacgctttatctatatatgcagggacctgcccaggctcagaatttaagggattcacttgtggaggcaaagtctgacattgttgtcaaggtatttcaactgcagagttggcttcatacttgtatttgtttgctttctgttgttacgtgaaggctctgttctgactttgttttcgttttaatatactattacgtagattggtctcagaaaagggtctcgctcatttgaggaggcacgtgctgctggcttcactgaagaaagtggtactttgggtgatatatgggaaactatcgctggcagtgatcttgtattgcttttgatctctgatgctgctcaagtaagtgcacttttgttatatatttccactactacttgttgaggtattagtcctaaggtgtatacatcgattttattctatcctgtttttgcaggctgataactatgagaaaatattctctcacatgaagccaaacagcattcttggtttatcacacgggtttctactagggcatttacagtcctcgggactcgatttcccaaagaacatcagtgtggtcgctgtatgccctaagggaatgggtccttctgtgaggaggctttacgtccaaggaaaagaaattaacggtgctggaatcaacgccagttttgcagtccaccaggttttctatctctttatctctactgcaaaagctatctttactgaaaagctcttatacctcatgtgttcattttttcaccactatttctgctattctgttggcaggatgttgacggtagagccgccgatgttgcattgggatggtcagtagcacttggttctccgtttacttttgctactactcttgaacaggagtacaggagtgacatctttggagaaagaggtgagtttgatccccttttagacctgtctttatatcactcaatcccatacttacatatcttcttcttttttgttaaaaggaattttgcttggtgctgttcacggaatcgtggagtctctgtttagaagatacaccgaaaatgggatgagtgaagacttggcttacaagaacacagtagaatgcatcacaggaacaatttcaaggactatctctacccaggttagtaggaagatatctgtagagaacagactaattcgtttttagccaaatataaaaatttaaaacctgtttctaatgaattgtgaacatcagggaatgttggctgtgtacaactccttgtctgaagaaggtaaaaaagattttgagactgcatacagcgcatccttctatccttgtatggagattctctatgaatgttacgaggatgtacaaagtggcagcgaaatccgaagtgttgtcttagccggtcgtcgcttctatgtaatgactcttccgaatcttccttttgttacaattacccaaacacagtttgtgcaggagttttgatggattctcttacttataacaggaaaaggaaggcttgccagcattccctatgggaaatattgaccagacaagaatgtggaaggtgggtgaacgcgtcaggaagtccagacctgctggtgacttgggtccattgtatcccttcaccgctggagtttatgtagcacttatgatggctcaggtatgtctatgtttatatctggtgtgcccacctttgctttggatttttcggtttatgcaatgtagagtcggtttcaatttccgttcagattttagaaaatatacctctaattggaatatttttgtcattgcaataggtttgtatagtctaattggattcttcttacttccattttgtttcagagaaattgtgatatcgatctgttttgtattcaattttgaattcttttttgtatggttttagttcgaattagccgcattggacaacccctagaatttaatatgctatcaattttcagtgatttcttagaatctaaatcatcgtggtttctatgtggatttgtgtagattgagatcttgaggaagaaaggtcactcttactcagaaatcatcaacgagagtgtgattgaatccgtggactctctaaacccatttatgcacgccaggggagtgtccttcatggttgacaactgctcaaccacagcaagattgggttcgaggaaatgggcgccacggtttgactacatcctgacccaacaagctcttgtggctgtggacagtggtgcagcaatcaacagagacctaatcagtaacttcttctctgatccagtccatggtgccattgaggtctgcgcacagctcaggcctaccgttgatatctctgtgcctgctgatgcagactttgttcgacctgagttgcgtcaatctagcaactgagtgaagggttgaaagtttgtcagtctcttatttgtaatcggagtattaagtcgagagtttgtgatgttttcttaggcgtgactgtttgttttgtttgaaggattatgtctctttgctttggtcttaaaatctacttaaatcaataaaatagtttaacgaaatttcgctttaactattttcgtaacaacatttgcaaactttcaacttaattttgtctagaattgtgtattgtcaatttcagtaactgaactgggattagagacgcttgagagttaaagaaggaaccagtatcgagagtttaggatttgatgaagtttatatgtctgcgttaatcttgcaacatttaggatacttttaggatataatagtgtgtaatgctacttttgttgggtcaaaaatagtatgttgctatgttgaatgattgaatatagaataaagagataagttttttacaaatgccagatagattgaatatatgtagtcactctccaacttcaattatattattattacaaggaaaaatcatttgtgtgtgtgtgtgtgtgtgtgttttctttcttttcaaaactaaagataaagaagaaaaaattggcagagcataatgcttttgtctctctttttactgagaaatgaagaatctaaattattagaatcacatgtaatgacatgtgctctccctctccctctgcacattttgcattatatgtcaagtctttttccctttccttgtaaaatcaaaaaaagaagaaaaaaagagagagagataaatccacaatgcttgagaaaaggaaaagaaacagagaaccaagagaatctgaattaattaataaataaaaattctgcaatcatatgatagtgtggctcaagaattagagaaagacaagaccaacatgtgtagccaatcatactgtattgctcttttcccacatttcatgttcatttatcctaaaaactaaaaagaaaagaaaacactaaaatctctcttttaacttcaagaattcttactgtccaattgataaggattcatgtttttggtttaaccaaaattacagctcgagtacaaactgctaagactatactatattcgaattaggtttattgcttgatttccacctagaccttacgaacatatgtacagtaatggtttgtattagtatgttgttgtgtcaccatccaaatttaaaacatagacaattttatttgtaccaagttgattgaatattttttttgttctaccaatttattaacccaaaataatttatcatctagtgtatttaaaaacatcaaaaattagttatttctggaagggaaaagactttaatgagtaataattagtggaatcccatgacgggactataccctttcaatttatttactttaattttgttataagacaaaatctcggtgtttggtttttgttaaaagacaaaatcttggtgtttagtgtgaaatcatatatgatcttgatttgacaccaatgctttgtaattatttctgttaataccaattcaaccatgatttcgatttagccatagagtaagagtatgactcatcattatcatcatcatcatatataaataaacctatatattttaattttttcatccagaaaattatttagaagaaaacaaacgtgagatgtactcaagtggtctttccgattttgtttaataatctcaaaattcatttattatttacttaactatctgccactgtttagcctgtacattattatctctctctatatatatatatatatatcaaataagtttgcactaagtcttctaaaaaccaatatatagactggcatgtgagatgttaaataaacatcacataaatcgtgcatactatatattcgaaaagctcttcaactttttcctcggtcatgattataagaaaccaaaaaaataaccatttttaaagaaactccttatttaatctgttaattgatcatgatggcgatgaacgatgatgcagataaagaagataattcacagcttgtgagcatatgctcatcacatgctcgagcatatagcctcaggtggcaaccaattaggatcattgcaataatgttgttagtttgattaattgttttggttacttatataactgtataatttgggggttataatataaacccaacaatatcaatagtactacttgttattgattagttttaacatgcatcgaataatgatttgaacattcacataaattatcaaaactagttcggatttaagaaaattagaagttgaaatccgcaacctctcgattgtaaatatagaattatataaatagaaaaacgtatgttcataaatatgtgtatatgcaacatgacagtgccacacaaatagtataaaatcgaccgttgttttgagttatagaaaaacttatcgatcattgtctcccgtcaaccatgacgcgatactactaaaacaatacaatttaattggtacataaattaataaatcatttgaattcaagcaacatctttggaacaaatctaatatatatgtattttgttttcgcatacttgtattgtacatcaaaaagtaaatcttgttagaatcagataatatagttaacactgtctagcagtctcgattaaacgtgcaacatttttatttctattaaaaaaaaaagcgagttggacggtaatgcgatctacatatattcttgcttagtgtatttgcactgacatcatttggttatgaaactaaaataagaaaaatgaatatgatggaacattggatacccttaatgaccataaggaggatcgagcttagctaagcgtagtttgtcgttaatttaaattattgatcaaataattagaaaaccagatattgacaaaacaaaaaataagaagaacaaatattgaaaaccagataatagccacccatacgtggtttatttgtcgttgtatatttagtattagggatcattgtgtttatttactctattcaattacaaatacctttagaccaaaacagaatatacaatgtgatatgcttagataaataattgctagaactatatgtttatttttaggtgcctagatcgttgtagtgtgtgaaactctgaatgattcttcaaacaagtagttttttcagtaataaaaaatgtctccaactccacatttgaataagttattagaacgaatagtttctcctttaatataatgtatatgacccagttattgggtttgcaactttgcatgtatatgttctatatatgtgtgaatatttttaacaaaaactaaaattaaattgacagatactgcagagtttacgactaataagttaacatcgtcatttggtgaaatcttcaagtgaccaaggcaaaagcatcactggaaaaaaaatcgatttcctacgcgattacgggaaacttttccgcaacagtgcaaccatttctcattcatccacagtgatcgtgaaatatagcacacgtcaccttcgaatcttacaaatgtgggtccatgttcatccagcacagcaccaacaataattaaggccttgagaaagaaattacgagcatcacacttccattaattttcttaacaaattattaaacttaattatagataaagtgtgttccccaaacggagggaaaaggagattttctcttctttttttttcccttctgtttttgtctttccttaattatttctcctttgttttgtttctttgaacccaaatcttgttattttgtttactgagtatgatgaacttaacaattaatttagtgacggtctaagaagatgtcaagtgccgtaattaccagctaattaagtactcaattccatatttgaaatgttatgttactcaccatttcctctttgtcgtttttatgattgggtcaaatgttgcggccaacaccagtacaagtatcacagatttaaatttagcttatgggatctttcaactagtgcctcacttctacttgggtgtgacttttttcgatgtattttttggagtgaataattcgatatttgagtttaaaatgttcattattgttagagtgtgaaacagtgaaaggtgtctctcggtcaatgatttttttttttttagtcggggaccaaatttttattttctatttcttatgaataatgtacttgatatttctatttattatacttgctattttgggtcaaggtttgaaaaaagccggttcgattgatccaaaatttggagacaatcatgtcacggaccgtccggtatggagaaattgcccatatcgtcggttcggcgggattgggggaccgctttcataatattccgtccggttccgttaaaatgtttattcggcgtgcttagctggcaactgtagcgaaacagctggcatggtcactctcgcacgtggccagcgtcgtcctatatttactattttacccctatatagcgctttcctaatatttctgttttcttcgttctacatccatttattttagtaagctacggaaccatagagtatatatagaaatggtaaatatatcagaacactgattaaattttgataaatgaatatttgtgttattaatccaagaaagaagataaaaattagcaggctttttcgagtgaaatgccagctatgcatcagtaaatgagccttcacttctcttttgctttattttccctatttttctgcttttcttttctgttcttttgccctactctacatataaaaatatgttgtattttcccattttcatgtgcaaacgaatataatttttaacttagatcaatgtaagtgtatatatatataataatttctatgagcacataaattgatagtcgtatgtagtgggaaaaaaaacacacgcaaacttcaaaatccaaatttattttatggcctaaaagttgactttacccttttgaggtctctgactctaatacgaggggtcaaaatccgaggtggcattttcgtttcaagctgcatatactcattacacattacaacagtattaatttaaaattttgtaataaatacatatgacgatccatttattttctatgcgttacataatttgattcgttttccatcatttgctttcacaaaaagaaaagaaaaaaaagagtgattcttaatggaagttgtccttatgtagtatttacaccgaacatattatatggttgcatagtaattgtttgaacctagatacaacaacaagaagaagacacttctgagttttttttttcctttttctttcctgactgtgcttcataaacatgtaagatctcgtatttaccgcaaaaaaaaaattcaagataacattttattttgacttttatgaattccggatttttttgtggtcggcaaatacaagtttcaatctagattctgttcaaacataaacaaactctaaagtcaaccattacatacagacacagacacagtcagtctctatagtacatgatatctaaaatgattatattttttttaataaaaattttgcataaaattaccgaatttttagcagacaagcagccgtgaaacacacggaagtcggggaagataagagaagctcgtgatgaacactaagaaagatcaatgtcttaatctgacaattagtcgttttacttaaactaataatatttttttaacggtaatctaaaattatttttgatttcaacatcttcattctcattcttctgcttcctttttatatatatcacaacaatctctcttctctctcttcaccaattcttcttcttgattctctgtgtttattgattctgaggctttggtttcgagaagatgtcacattatagaagacattcgctagaaccttccattaccagtaaattccgtgattctttgagtttccaacgagacgatgacgtcatcaacaaaccagatttccgagaactcgattttggttctccgttgaggcctcgtggctcctcctccgccgctgccactcccgccgctagtggcagcagttcaagctcctctggttctgcttccggaaaacccgctgtcacttctcagtttgctagacggagtcactccggcgagctttccggtttaagccagaccagtccggttaaacccggatccgtgaaccggaatttgaaaccgggtcacagaagatccgcttccgctggaacgccgttgatttattccggtttggggttctctccggtgaacaataacaataacagttctcgcggcggaggaagcggggctacttcgccgaaccccggcgttttacctaccggaaacatttgtccatcgggaaggatcttaaaaaccggaatggctacacgagcctccgttagacccgagactctatgcacaggcacggccaactacggccacggaaacatcatccgcaccggcggaaaggtgagtcacgcgacgaaagcggcggcggaaatgagtgactcagaggaggtgaagaaggcaggtaacgtaatgtataggaaagggaattacgccgaggcattggctctttacgacagagctatctcattgtcaccggaaaatccagcttatagaagcaatcgtgcggcagcgttggctgcgtcagggaggttagaagaagcagttaaagaatgccttgaagctgtgagatgtgatccttcttacgctagagctcatcagagactcgcttctctttatctaaggtaaaaaaaattctatcctttaaaaagttttgattgaaaaaggattagtatttgattggtttggttttagattgggagaagctgagaatgcgagacgtcatctttgtgtttccggacaatgtcccgatcaagctgatttgcagaggttgcagacgcttgagaagcatctcagactgtgtacggaggctcgaaagatcggtgattggagaacggtgattagcgaaatcgatgcagccattgcaaatggagctgattcttctcctcaggttagagatcaaaaagtggcattgattgcctcttttgtggttgaattatcagcgaaaagactttatcttttaaacaatgaggtttgatcttgtgcagcttgtagcttgtaaagctgaagcctttttgcggcttcatcagataaaggattcagatttgtgtatatccagcattccgagattggatcatcaccatactcaaccacctgagaaactatttggtatagtatgtgatgcttatgtgctctgtgttcaagctcaagttgatatggcgttaggaaggtgagcttcgaaatgcttaaacttcgaatggtgtttttgattctttattagtagtcttgtttggttcttgggtgagtgagtagagatgttaggtttgttgcagatttgagaatgcgattgtaaaggtggagagagccatgacgattgatcatagcaatagtcccgaggtagtatcggtcttaaacaatgtgaagaatgtggcgaaagctcgtacccgaggaaacgagctttttagttcggggagatactcggaagcgagtgtggcttatggggacggactcaagttggatgctttcaattcggttttgtattgtaatagagcggcatgttggtttaaactcggtatgtgggagaaatctgttgatgattgtaatcaagcgctaagaattcagcctagttacaccaaagctcttctccgaagagctgcttcgtatggaaaggttagattgaagacactgaatggttttgaaccgagtttctaattaagtatttggattaacaaatgttaaatgcagcttggccgatgggaggatgcggtcagagattatgaagtattgagaaaggaacttccaggagacagtgaggttgctgagtctttacagagagcaaggaacgctctatcgaacaaatccgaagaacctaaatatttgggattcaataacgaagttgaagaagtttcgaccttagataagttcaagaccgcaacatcactgcccggtataaactagctaactcactttgcaagtgttagtttcaagattcctctctttgctaaacaaaaaaaaatggaaatatttttcaggaatctctgtgtttcatttcaaatcatcatcaaaccggcaaagcgaagcaatatctccattcgtcaacactttatgcttacggtatccattagtacattttttcaaggcaagtcacttgttcttatgctcaatcgcgcaaaatggttatcgtttttggtctaacgctttaacggggtttgtttgtctataggtggacgtagaggagagcttggcattggcgaaagcagagagcatcaagaaaattccaacgtttaagatttataagaagggagagaaagtgaaggaaatggtatgtcctagtcatcagttactagaggactctgttacgcatttcctcttataacatatctctcttctcattctttcaaatctttagtcttcacgaacgtaaattgattcaaagagccattttgttaattgaaattttcattcttttgttttgctttactgtattatcatattgaaacctgctccgattgtattaatccgaggaaaatgcatgtttctcaattatcgttcatgcaaaaaggccccaatttaatggttcatttggttttcttatttttgtttgttttagaaactcttacttattacaaatgggtcctggtgggctgggttacttgtaataacactgctttcaataaaatatccattgacaaataaactatagtttcatagaaggaatttgaggcgccaatacagaacacaaactatgacaaagtctcaatgagagcaaaaatgatttgcctcacattttgggcaaaggttatgaatctcaagttcttaacatttcatattaaagtctcttaaacttaacatgttatggagttgagaacttgagatttgtaatagataaataatgaattactaggatatagcggtatatccctgaagattttttttttattttccacctcattaaatcataaattagaacacaaactaagaaataccaaacaatactaaccaatataattttgctgaaaactgtttcttgtactgtttcattgtgtagatataccaatataacgtcaccaatttttttttcaatcctgggttggaatcggaatcttctaaaagggttaaaatttacaaaacaaagagaaactcatgtttctttgttaccatatcttctattggttggtggaagaacgctgactttctctcatcttcatcaaaatggctacaatcacaaactcatgatgctgcaaacaaaaccaacgacttagcccaacaagtctacacattttgtacataggcaaagttttgatcgactagggagttttaaatataaataaaggagtcgtacctctagaagtaactagggaaatccatcatcccataatcaagagctgcataaacagaaaaagttcacttattattcatacatagacctgctgctgataatttgttctagtggtcaaacatgtaatgcaaagaggaattcatcaaattagcaggtgactaacaagtaaagaaatatggaccaagcgaaaacgaaagaaacaaatgtctgtcgtgtaatgccatagccaagttgcaggaaagatttgatgcatccaaaaaaaaatcaaattttgtctcctgagactatatgtcagaaactaatggttgatgcatccgaaaaatccttccacatatcatgcattctcttttcaaacatccatacccattatttcctaactttcgaagcagttagcatgtaaactcacaatcttctcaatcaactaaccaacaaaaaggctactctacactcaaaacttactgggcatcacactcaaaacacttcacaaagcactcatgcttaacaacaaacagaagcagattcaagtttctagctcatgaactgcttcccaactaatgctcacatcagtcattgtagaaaaactttccacactcagactataattacaagaaacacaagtaacaaagcaacaacatctaggagaaaaatgtaaccaggacctcctccttaccatgaataccaatacttgctactaattagtttatttttgttcagattcatcatctctgtgcgatatcaatttgttcttgtactttgattgggtttattatagccgtcgttggcacagagactatcacaagtaaaaaggtaaaatttgtttctactcttatgctatagtcactgttacacagctaaacaatggagaaagacatagaattctgaacagattacgaaatacggcgagagaaaggattcaggtctcaccggcggaggcggaggaagtcggtcctttggagccagaggtacgccggagcttatgaagacgtacctgcatctccgtgaacagttgcatcctatggcattccaattccttagcgaatctcattctctgcttctccaattcaaccatttccttcctcttcttctcctcgactctctcgtatatctgtccaagcctctcaattgcgtcggcaacttccttgtagccttgcttcttctcaattttcctctcccgcttcttgttactcccgctacgaccgctcgatctagaccttgaaccttccgagtcatcttcagacgccggacacgccgccgccgctgcggctgccgcgaatgcgttgagattcccgcgaaatccgagtaaatcgtcaccggcgtgaggtataatcgccggcgatgtcgccggacgtctggggatcgccgatcgtggagcgaccggaactggattaatggacatcggaagtgatagcctctggtgcgggatgttatcagttgaatcaggattactagacgtcggaaagctttcccggagaaggtcatcgagagcggagaagaaaggccaagggctgatgtaggcaccgggattggattccgaaaccctagccttctcgactttgtacttcttcttcagagtatcgatccggtttttacactgaacgtcggtgcgatacggctgcgatttggcggcggaaacgtttcgaccggtgttgtagtgacggtcgttaacggcgttagccacctcttgccagtgtttctgacggagattacctcggctgaggtcgacgtagcgattaccccaggcttggatgagcgtgaaggtcgcttcctcgctccagcaatcttcacgagaaagcgtcgccggcgaaggtcgggaagatcccggcgaaaaggaatcgttgacggtgtccattataaggtgaacgacggcgagttagatcgaagaagatgaacggtgaggatgagataaacggaggtgaacggtgacagtgacggtaacggaattgaagagaaacgaagttctttttttttaaaaagacaaaccagcgtttttgctttgtgtgcatgtactaaaccgtgagccagactaaacgagccagctctagctaatttatatacatcgttaatttggtttttattttttaacagctaaaacgttttaatttttattttattttgttaatgttgactaccgaacaagataatatttctctatatttttttttcttacaaaagctttaaatattcattttaatatgcaatttgataagtctaaagttaattagtaatattatgtgtggtagttctaattaaatttcattatgaatcgttggtaatatattttttttttgggtgaatcgttggtaatataatatgtaagttttggttgatattttcctttttttttgttgtctaacttaattagaatatgataacggttccaaatgaattggtatcacatcctaaatagtatgtaattgacaaatttatagcatggtgaaatttctgaaactgtagattgtagagaaaaatcaaagctaattaaaaaatcggatatggctcgttagatgtttggtttagtttccgtaaaatgtaatgatagtactgccaagtagaatatgatcaaacgatctatttttgtaagttaatgacacattgctatattagaataagttattctaagttttgtgtgtttaggtgataagctaaatgggtaacgcgaactactagtatcgttgttatatcaccgaatttaaactcggtactagaatgtatgttgttgtcaaataggtaatgacaaattacggctacgaacataaaatcgttttttctttaaataactagaagttctgcaaaaactgtagtttgctcttttttctttgtcaatcaaagctccttttcatttcttaaggcacgaaatataaacgaaaagtacatgtatttgtccgtaattttcttatagcaaatgcaaagcagggaacaaaccttatggtacgaaaaagagtagcaagcttgatcatttaaactgaaagaatgagcaactcttctcaccttttgtaaaatttataagacttacttttttgtttcagaggttttgaaatttacgaatttgcaaatgattaaacggaaaagagttccacaaagctttttgtggatgtgaaagcgccaaagttcttttgtacaaactcaaaggagaaagccaacaatattcaaaaaaaagaaacgaagaaaacaaaaacctctctcgctgcaaagttttatattcacagaaggaaaatatgattgagagaaagttagcaaagcgaatactcacaatccagcaaacgagagagtatctcattgcaactcggtctttgttccggttctgtccaacaatctgcgaacaagagacaacacatcagaaaaggatactccataaaccccaaacaaagcttcaggaaaaacgaaataacaacactttgacaagtcacaagacctgcaataagctttcccagtggtccttcaggaatctcaagccgagctccctcgtaagcaatagcataaacaacctgagaagaaatatgaggaaacttgttatatatacacatatgtcactaaagagtcttcttcttgttcagttaagttacccgttcaggcggtactccttcccaaggtctggttaaagtgcatagctcccacattattacacctaaactgaagatatcacacttttctgagaagggctcattgcggataagttcaggagccatccactctggagttcctgcagagactgtgtctctcattgttgtccctgtcattattctcgacagcccaaaatcacagatcttgactgtccatttgttgctcaaaagacagtttgcactctttatatcacggtgtactatccccatccggtgtatacacatcaatcccctagcaacattttacaagtttaaacgctgtttgttaattaaagatgattacgaaactttctcatcgagacacaattccaggtcctatttggaagtgttattgccttctcctcaaaccaaaattttccatattaatactacatactatgttggaaagaaggatacacggttttgtatggaagatgaaattacctgcaaatgtcccgcagcatctttagcttcctccgccagcttaacctctttttttgtccactcaagtggagcaagtaatacaaagatcccatttccatgtactcagtgatcagtgataatcgtggaggctttgtgcatgctccaaggaacagtataactacaagaagtcgaagatgcatgcattgatgaaaacatatactaaaatctcacagtgaaaattcatagagatagatgagtagtttagtaccattgggatgtctaagtcggctagtggttatttggacgcagaaggagaaggcaggaaagaaagtcagaagacaagtaaagacgttattgccaattttgaataaaacagagaaagcctatagacatacctaagaattgatatctcattgcagaaatcctccatgttctcagctgtaaggtcttgctcaaggaacactttgatagcaacgtctgtcccgttccagatcccacggaatacttctccgaaaaatcctggaaggaaaaatcaacgaagaagatttagatgggttactaattcaaaaaaaaaaagtaaacttttgaagatagataaatacgagggtaaggatcgtgaagtaagataactagacgtttctcttaaggaaacttatggccaacaatttttttaagaacacataaattcgaaaacattgagctaaagatcctaaccaattccgacacgtgtcccaacagtcagctcagagaagtctatgttccattcttcataaggtaataatggcttattctggaacatgggagatcccaatactttatcccagatgtggcttatattgcgatgtgacgatccactctgttcatattggcttcggtagttctggggagaagaaggtagtgagattgccttctgcggatctagtggttcccttgaaagtgtcgaccttccaccagaaacttggtcatgggcatcaagatgaaaaccagagacctagaagcagagaagtctagttaagccacaaatttataagtcgttatccaaaatgagtgaacgtttccaagaatcataattttaagcatgtttgataaacatctacttgaaattgatcattgtgcgttgttgttgaaacagaaatttttatttcctaaaaatcacaacgcagcatattctaggatttttctttcatttcgtgaaattcaggacttccactttcaacttagtcaacgagaaaagagacacggtttggtattctgttgcagcccaagtttctttgttttcagtaaaactattatgattccaagcaagcagcatagccaaatttctcaatatatttcagtgatgtatattaataagcttagcgtacatttttctggagatgagagctctcggttctgtcatttggagagttaggagatgaatcatcatccccttgctcttttgagaggcgattctgcttcaaggcttcattcatcgctcgtactgccctgataaagattaacaggtaattttaaaaataaagttatcaatataataattaccaaaaacactgaagctccgtgttccaaatagttaatggtcaataaatctgaatgagaggtaacaaccattgcaattgctaaaacttttagttccatatatggaatgttatacaatcacatgctcgtgcagtgatgtatgagatcccaagttagaaaaagaacgcccctctcttggcattcttttaatatttaccataagagtgtaccattaattttgtcctaaacatcatgtatgaaatcacaactgagaaaaaaatatatggtgaaactgtatacaactgcaacctatcactggaaataattatatattgaagtcagagaagaatgttatgaggggaactatatatgtaacccaaaatgcagatagttaaaaaaaacatcatactagctttgccatgcacatgaagttcaatgagcaataaactaaacacccacctgacaatatcatcgccaatctcaggagttatactgatgcttctcctccttattctcttagtttccatttttgctcctccaacagatttgcagctgcacgtgaaaactgaatacataagcatttttttaacaaactttaggcatgagaacaaggttctctgacacccacaaaaactagacaaaagaactcggtaagcactaaacgagacaccaacaaacaacataccctcttgcagcaatatattgcatatttataaaactaaaagctcaaatcaagtctgcaaagacctctccaacataatctaagttacaaaggacaaaaaccataacgaaccttgatgtggcaacatccccggtgaaatctcgtgccaagttcttgtcgccacttagcatggactttgtacgggctcggaaggaaagatgttcgggacttcagacgagatatatcaaaaacgatctaagaaattagattggaacttggttcaaaaatgcatatacatatacaattcaacggggatgagagtacctggaactagcagtccgctgatcagcaatgaccttcctccggctctgccgccaaaactcgttagccatgtttgactcgctctgtgagaaactgaagaataaaagataaatactaatgacatacggtcatctattccactgcttggtttaccagaagctatattcaaacctggggttggttagcacaaaaaaataataataacaagtaggcttatcaccttaatttcctctctagcgcagaggcagatcgtaacagcatattccttgatggtggaccagacgtatttggagacccatccagtttcctgtgcaacgaaaggttttcatctttttctgcactgtacaacaccaatcattagaaactctgcacaacaaaacactgagtattgaacagaaggtgcagtaaaatatggtacacactatacttatatcctgcatgttcatgcagtgagattttacaatttaaaacttcaacatctacttacttttcatggtcaaatttctctggataaccaaacatgggactgtttggctccaaaggtgaatcacaagagtcattctctgcagaatcactttcccctgccgctgagatatgactcataaaaattgctttggttgatagaggaataagctgaccaggaaatcgcattaggtcaaccagcatttccacagaattcagcaaaacagtgacagaaatatgactatatgagtccacactctcagcagctccatcacttggcaaaccctgatcaaacaaatcagtcataatgcaaaggatgttaaaaggtgatcaaaatattcagaaatttaagccacgatgaatacttttttcgagaataacattaatcaaacctaatcaatcacaagccaaaatggagtgatactcaagcccactgatcacatttttgtatggtacttagcacttaccactacaagtcgactttgcaggccaacagtatcagctaagactttgaacaagattgctcgaggacgacaagaaccatgcttgatctgtcctagcagttgaataccacagttttcaaatgactgcgtactttttgctggactctgcagagttgattgcttataaacatctgctacctgccagccaatttcgacaaaggttttcagataagtaaaaggagttaacaagatttatgaaatgcttgctcttaccgcatcaataacaattcaatgtcccctgtatagactaataggggatacaagagaaaaagtcaagcaaacaaagatacgtatttcctaatttaacgcttttcccaagtaagcacaacttacaagtggaattagagaaagattgaaggcaagaatctaaatagtctggggaactttatcttgaaccacagcaggattctattgatagtttcaccaattttgaaaacatagaagacgttaagatcaatgtggcttctattagtattataacggacactctcagcatcacttttcattagacagacaactagtcacaactcttcctacctcaatttttatccatttatgatcactgtttttgcatgcaactttaaaatggaaaaacaatatggttattaagtgatttcatacatgaaacaaattttgagcatgtcgattataaaagatatgtcaaatactcttaccagtccagcaattttcttaataatagtagctggctttgagttcaatccactgacaagtttggtaatcaactgcttctgcctgaaaagctttttatctttctgaaaatcaactagaatcacatcagccttaagaccttcgtcacccagagcatgaagatcttccaatgtaggaatgttattaaatagctgcttcaatctattatcctgtagaagattgaaatataaacattgtcaaaggaagcaaataaaaaagattcttgacaggtaacagaagttaatcgagttcgaatgaatttcactcaaaaaatcattgaacagatctaatatcaaaataaaagtagcttaccgggatcacagagtagaagccatttgggatgggctcagaaagtgaaccagtactccaaagaatattcgaagcagtactagatggcagcccatcttgcccaagatttctaggtgagtctttagtactagatgtctcttcttgcgatcccagataaacagaaccaaatttctccacaaattctgaaggccaccaggtttgattagaaggtccttgctctgatggcccagcatcatctcccgtctctcccattgccaatttccttaatgtctatagttatatcagcccctacttatcccataaacggaacagtcgaaaaaagaaggaaatcctagagaccaaaatattgagaatcaaacttcatttaccagtagcccttaagctggaggtcatttgatctgcgttcacagagacgaaaatggtaattaaaaactacgatggtcataaaaaaaatggaaacaaagaaggcggagattttaatgaattcatagatacacattgaagaaacaaactagttgaacttgtttttccacatcacaacctaactagtgcagtgccaaatagaggaaatttcaaacgttctcctcttcaacgatggctgcatcaaatattttctaaaggatcaatctaagctttaacaccaaacatctcactggatgcataaaatgatccattatcagccaaaaatacaaaacaagaagcggaaaataagagttaacgataagaaaaaccatcagcatttcaacaagaacaatagaattccactctcataatccaatctcactctcaagtcaacgagagaatctcttaaggatcttaactgaatatagcaaaccaacatagatcccatgagtatcctcgtgtactaaataccacaattctacataaacttactcccgaatagaacagttcataagtgcgatctacccagaaactcagtttcaacacgaaagcaatcctaacacagaacccaccataacttaaaaccgatacgaaagcaaacaccatctagaaacacacctaagctcgatccaatacatagctcaaagtgccacaaacatgaatcacaattcgagagaacaaaaaaaagaggagaaaagttcaaaaagggtttttgtaaaatcaccgtaatcagatccacgcattcaatttccgatcgaacttccgattgacgagtaaacgaaatcaaataacaaaatcgatctcactgcgaagatagattcagcaaaaatctcgatcaaagacaacaaagagctatgcgttttcgtacacacatacaaaaaataatcagagagtatttgtatgtgtgtacgtatatggtttttttaatagagctgggaaattgggattttatatagtttttgagggaccaaacgaaagaaagagagtgatgggatttgaggaaagtgatgaagacgagggaaaggagaggaagatgaagaagaagagagacgactgaccaagtgacgatggctatgtcacgtgcgagttgatgagtcacgtgtcataaagtagatgcacctctcttggatcgacagctggcatcacacatcatccctcgtgaatccccaccgtcgcttctctttttcttttttgattggtggtggtaatcttatgcttttgtttttgcttttttttgttaataacttaataatacggagatttataagaagaacaaaaattagttacatatgctatattttattttttgacaatatatatatatatatatatatatatatatatatctacatatacatttttgtaatcattttgtggaaaaaatcctggagttgagacttatttggagttgagacttatttacaatggctgccactggattttaattatttgattttttttaattaatagtttatatttttttaaggcaattaattgtataacaaaccaaaaatattcgaaatatatgacaatcccatatgtcacgcaaaacacgataaattatcttctccttatctcacctacaatattcactaaatcttaaaacaaccaaaatttgaactatttgaattatttctattaaatttcggcaatcaattaaaatgaaacaaaccaaaatacatttacaatcccataaaatgagcaaatccaattatatgtgcacctaaaaacattccttatcttggtttgaatattccatgaaattaaaagtccataactttttcggcataaaatcacaatcacaactaattcaacaactaatatttaaacttataaaaaaataaaaaatcatgagacaaaaaatatagcgggacggatttagattgatatgaatagcaggacgggtttggattgatataacacatgttaaatatttattttattattttatcatcaccaattttttttagttacaacattaatataaaattatataactttaatactaaactaaaaccgtaaaatttatattattatatataaataaaatatttgccttgtagtgtaccacgggttaaatcctattatatatatattttacctattttaaaaagagatggtctttaatacaatgaatggagtggatgaaggattctgtttataagttgaataaagagaacttttatcaaattcggatttttaaattgttatcatacttaatacttttcatactattattattttttcattgttaaggaataatattaaaaaattaaaacaaagaagaaatgacatcatatgaaataaataaaaatgatcctacgatatcgaaaaaaataaggggttaaaatgtgaggaacagaacctgtaatttaaaaaaatctaatgacgtactgatgatgactatgtgttgtgcaattatggcaaagttagcaatcaaatttagggaaaatttaattaaaagtggatcacgtcaaggtcaataagatttggaggaaagtttcaaaagaaaaaataaagaattgcacgtggaacattatcatcgaatctattcctttttttttttttttttcctttttccccggttataatttttttttgctgggccaaagttaatattcttcgaataattctgataaccaactcattaaaacaaaaatcaatttgatatctacttaaacaatcaacccttgaattaacatcttctaattgttttgagaccaaacacacaactattaccaaaccttacatattttaaagctatttctcgatatctaacattttagtttaattatagacataaccgttttgatgattaaaatagttaaataaagattatgatatttattgggataatttcttttcaaacactatattattatttattaagaaaagactttcttggtttcaaattagttgtcgtttgagatttttttcaggcttatttttaaatattcatttatgttttctgttttagcattaactaaactaaaataatttattcttttctgttttagcattgatattatcaattaataaactaaaagaagaaggggcaaattgaaatttttgtcaataattgtattgaaaacacaaaaccataaataatttgaagcaaacttgaacgtctacagttacaattaatttgaaacgaagtgggtatatttttcaaaggttagaatatttttagaatctatataaaaaaagtaattaaggattaacatttgttaacaagaaaaactaaacacgatctataatttgatctctggtaatgattctttttagcagtaaatgaggaaattattgcatcaaaacaattttataaaccgaaaatgagaaaccgaagaactcgtgccctcgtcattttgccaccgacacctttgactttctataaaatatcactcaactcctaacatttttaaaataacattatacttcttctgtagccgtatattctcgcattacttcagttcatgcagacaatttcagaaccagaagaagcttcttacgaagacaatacaagttacaacaacgaccgtttaagaacactagtagataaaatatcactaactaaatcatcaaccaaagcagaaacaatctctccttccatgtctattccttcctcaaacatctctctttcataaccaatccatctcccttcaaaacagctcatgtcatgatccacaagctcgtcgatcatcatctctctcatcttcttcaacccttttacttctctgttcacttcttcagccaacaaatctctatgttccaacaaaatcccacctgacatcatcatccctttgcagcttccaattaacatcctttcaaatttcaccgctaagcactgattcacacagtcgaaaagcgcctttctttctgtcttcattgacgttgcagctcctcgagagcgttccatttcatcaaagaggctggagggtagtaatgattcattagtggttgtccctgaggcgaagtcttgaaacatgagctgcccagagttgaggatctcggttatgtactcgagctcccaatcgagtgttgctgattctgtttcatctaaggtgtgctgggactcgttggatgaaccccaagtgagctcttgatctgatgaactctgtttcatgcctgaaaaaaccaacaacattaagcttatctagctgcaaatcaaaccaatactaagactattaggtgtgaattcaaatcctggtgaagaaaatctagacataaattcacaaagacataccatattctctgtcatgtctgcaatctgagatactcttgctgcaggagagtgcaaaatcatcagcttctgtaagagtggtgatgctgctaacttcttgttcttctccctgtattaccttctgcttctaaaaggaaaaagacaagattttctcagagactggtaagccggaaaagcattcgatattatagaatagtgaagctatagtttatggaaactaacctggactttctggctgttaaagaatgaagtgcagtcagaaacagattcactctctgttaaaactctatcaagactgctttgagtcaatccgctatatttggaaggcgatgaaatcatcgcattcgctctatcttttgaaatggaactcaagggctcttcttggatcaagctagagctagatgattcaatcttcgttgtcaattccctgagcttctgctccaaaagcgcatttaaagaatcaccacctatcacattgaaccttatagcagagtctgcatcttgtttggttccttgtgaatgaggagatgataaacctttgatcgaagatgagaaagtgaaagatatcacatccatgtcccttttctgatcatctttactagtactcgagtcgccatcaatggaaatgttacattttatcgacttttcaccccttttgatccgcttatcttcataaattccagattcttgcactccattccgcggttttttgcttcgaggaagactctttttgcgggataaaggtaaagaagtgggtttttctgctgatgacatagtaaatcctgagctcttcgatatagatccactttccacaagaaccttatttactactttgttcattactctcctggattgctgattgtctctgcagttctgcttctggttgttttgcctaagcacattctttccggtactcaaggaagatcctttgctactgttttggcttttaaccgccctattcttagcttccactttctccttttgtcccgaagacatcctcttgttgccacttgaagacattgataagctgtcttgcttctgattactgctgacttttgcttgcgcagcgaaagaaggtggcttcacttcaccacctttcaaagcatcataactgtttttccccaatactgtagttttcttctcgttttgatctcctcttaggtacctactgttccgagtatcattagagatttgaggaactgaagttgacgctttctgcgcagcttcaagtttctctttcaaatctcgaatcctcaatggaactggagaagaagaatcagacgatgacaccatccgtgttcttgcaatcatccgtggactttgctcgatcattcttgaagcagcttccattacataagcagggttcctagatggaacaaatccaggattccttattggagacaagagcttattgtgagtgacagagatcggtttagctgatctcgggggtaaagtttcggtttgaaaccgctcaatcatccgtttacgcggccctttactggttcttgaatccaaatgatcccaagaaacaccatcgaagtcactctgacgatcaacattagcatcccaagtgtttgcttggcgcgaggatctgagaaagtatggatcaagatcaggattaacccgtggttccaaaacgtttggtagtggtaaaccctctaaacccataagcctcgctaccacacttgctctaaccacatttccatcatcactagtaacagatgaagcacaacagctagagtcacttctcgggttgtaagttgggttctttacactctgatcaacttcaaactgttgtaaacagatcacaccaaagaacacaaatagttcatgtcattcagtaaactaacacaaaacaaaacattgcatcaaacaaggaaaatggtgttgagtaagaaaaggcttacaacagaatgcggcgtaatagaggggttttgaacattctcttttgcttgcttagattcttctgttttaaaagaagaaactttagattattaaacttcattaccttaacttatatatacaacaaaagctggaagacataccagagagttgggagagattggaagagaaaagcttcttcctggattttccatgccaatcaaacagatttagaaacgctcctcttggtctttttctctcaacgacgtccatcttaatttacctatggatcaaaacaattgaatcagtttaatttcaatggaatgcacttataagacgctggatcccatcaaacaacaagaccccagataaaaaagatcaaaacttttccattttattataatgaatcacccaatttcagctgaaggatatagagaatgtgattgatatagcagaagattaaaggaaattagatcaggaatgaaatttgattacctctcagtttctcaggctgccaaagatctcattttttacttatggatccatccattaagtgtaatttgcagaaaccctataccgaattcagcaaaatgagaacccagacagacacagctgagagatgttttgcaaattggattgacccaaatcgaaacaatggtggctttgggagatctagccctaaagatcgaccaaagctctccacttttatctctctcagctcacgaatcgcactgtagaacaagaacaacgaccatggaagaagataaaaacacaaaatgagatttatcaaatcagacaaacaaaacaaagaaaatatttggggggttttggaggaatgcgtaagatcaggaaggctcaaagcagatttgagattagggatttgggtagtgagctaagagaagtgaagaagcagcaagagacgtttttaaaaaaatgagagaagctgagtttgaattgaaatgacgacagagagagccgttgcaaagagagagagagagagaaagacagacagagacaaagagagttttgaatttaggaaactgaaagctccctcctttgagctattaaaagtgtttcttttttctatacataaaaggaaaatcttttgtttcaacaactattttggcttttatacatatagcatgatctcatctacaaatatatatagcttgatgatgttttttttttttttttgtcacaagcttgatgatgtttatatttggtatccaatgcagatggaaatatatagcttgatgatgtttatacatgtttcagttcagtttgcagtttcaaacataagagaatttgaattggttaggggacaaaaaaaacacataatttaaaagaggtcataacgattcaattttcaggtgtagaaaaataaaggcaaagactttattgtaaacagtgcaatcactgtatatattaatattccattttgattattataaaattatttcgttgggcattaccacaattcatatttgtgtccgtctcacaagggctccactttcgtatagttttgaatatttgtaatatgctgcattctatgattcgaattacttaaaagttcaaattttttttggactcttgatatttcacaatcagtttttttttttaaaaacagaataaatgagtagaggaagttgttgtggtttgagttgcttcgaagtagcgaaaccaaagagagtagagtatatgagaacgatgtctgaacaattcgataaaatccctaggaagctttacacgcatgaagacttgaatctcacaatgcagagccgatagtgaattc

SEQ ID NO: 113 - DNA, 91851 bp, Arabidopsis thaliana
aagcttatcgtcttatggcttcttgtggaaagactgttcctctaaatcaaagtctcaagtcctatttcaagtgtggctaaaaatagtcaaccaacaaaagcaataagcggtcgtcaagccgaaccggagatacttaataagattagttaatcaagtctttccttgtctttttttaatcgtataagttgttgctctaattggccttcattatatttatgaaccatctctcccacattccacgtttttcttgctttttggaattactatttcactctttcaaattcgatactttgtacttgcttttatttaaagaaataaaaaagtagtctacttctatttaaagaaacaaaaaaaaagtagtctaaactagagaaaacggcatgtacgcgttaattatgcatacatccttggcccttgggactattcttgtgatttcacttcataattaactgtcacacaaacatggccaagatggtatcaagaagggaaaagatggtatctactatctagaactctcaggcgtccattctcgtgtttgtgagtttattaaagggtgtggtccccgactctttcaaatgtatttataacaagtttaattagttcacatgtcgcgattgttatgacgacacaagaaattatcgttttccctttataacgttgtcgttacgaacttccttaaatcccccaaaaaaagttttgtttcctaattatcctataattagttgatgatgttagggtttgaaaacttaatatagcgaagaaaaacggtttactatacttaattatgagcgtattttctttacgtttgccactttctttctttgcatggacattcactaagagcgtgtgtttgtgtttcaggtgattcttcgctgtgttagacgtggactacttctaccggtgttcaacaatctggtaagcttgtcttttgggagtacgaacaaaagaggttggaaactgctgccacttctgattgagcagtctccaaagcttgaaactctaatcatccaggtacgtatcattagctaatatatctaaagagagtcagagattagggacttagtggttgagcctttacatccatcttcttgatgcttttccaggggctggatagagttacacaggcgatgtgaccatgcctccgttccaagtgaagatgctgcatgttcatggttatggaggaaatgcggaagaggtggaacgcttacataaatttattggggagtcggaatgcggtgaagtggtgctaggctgcggaagctgtggtggataataccatgtattgcaaaccaaaagggttctatagtctatagttgaggcttcctggattttcggtttcatccaaatgcaagatctcatgtagtttaccaaattattctgtgtaacaattcatgtacatgtcgcattgctcttgcagttgcaagggcctctttaatttcagggagctatttttctgtatcttttggcagtctctcccttagatgatacacgagtaaccttacctacctcgtcaaactccacctggcataagattaacatttctgtatttgatgactacatcgtccctacaatgcaatttcacacttctttccactcttgcagactttacacaatatgtggtccattagcttggattttcagtttcatccaagtgcaacatcttagacgatgaaaggtggtgattaacaagctgatttgattcttcactttctgatttgtgatcttaaatagagttttaggattcttccaatctgtagtatatatagcttactagtttttaccagcagaaagatcttcaggagaatgccgatttaattagagcgtaaaaagtaaaaacccttcactttatgtgcactaacctatggctatgcatcatccgaacgaaaccaatgtcagaacagaagaagaagaagaataaacaaaactttctttaaggcaattgaagctcttttgttttcgacaagaaaaatctttattaaagagagaaaatgggggaagagaagatctatctcctaaatcaaagtgctgaaaaaccagagaccaaaagactatacttggtggttctgttgatgatctctctgttccagattcctcacattgtctactatgtgttggattctcttagaaaggctttcgttgtgctgttcgatctgttcaaatagcatctccagatgtcttttgtaagtagccgctctctttttctctgctgctagctgctgcatcagttcctgaattttgtcgtgttcgttctgcaaatgaggagagcaaagttttagaatttaagtcttttctagtaacaactgatatataagcaaaatcaaaacaccagcacatgaatatgaatatgctatatagcaactagtcacgaaccagtatcacatcagcatatatatatatattaaccagctaaccaagaaacgccaatttggattttcaaatgcaatggctgaatataaagaaatattgaccaacgaaagagagtaacaactaaccggatattgatcataaatgcaaccccttcgaactctgccaggcatcaaagagtgattgtgctccttgacaaactttgtgataacccatttaccagagttctcttttctaatcaagatcattgctttacatccaacccttgtttccgctctttgtctaataaccttatcccgcttgctaggcaacctgtaaccttccttgttacaaacaagttgcctgcctatgggagatccatcatgccttgaccgtgacagtttactaacacggatgacgaaccctactttagtagcatacgcattataaaaaccatgagccgctgcttcagattcgaactcctggccaacgtaaggctcatctccttgagcctctgtcatatctgcaacagccagaggaatagaatcaagatccaccttctcatcttgctcaccagaattttcaccgagttcattatggttgtcatcatcttgctcaatcattgcttgaccagagctttcacccatttcattatgattctcaaccgtggtaacctcaagctcaacaggaatccccatcatcatcccagcagctactccattatcaatcctgaaatccactgcaactcaaaaaaagggaaaacagcaattccactaatcaaatatctagcaagaagagctacaagtgttcatcatcttactaatacaaagttgtcatcttttctattccactgtctaattcaagatatgagaacaaagctcaagtacaagtgctctcaaaatcatccagcctccaccaacaatacaaaacaaacttaaaatggaaccattctttgggattcaccgtcccatagattcaagagtcatcaacaaatcggggtttccaaaagtatcgagatgtccaacttctcagtctcattctttcgcagggactagtctaagtggcttaatcgatcaatccaaaatcgaaaattaaaaacccgaaataatggtgtaaggaataaaacaatcttactggtcaaaagatattttccggcagatgtaggtcggagacgacgatcgaattaggttttcgatttgggggagagacagagaaggtgccggttcagggtatggattgcagaggacgcagtaccctatgacgtggcgatagatgattgggtcaaaatcggaaagaagtcaactcaccgttcatctaagctttgggtttatcgacttatggttcctccggtgcgcttcgcctcgtatgattattcctcatgttctttttttttctttcattacatgtttattttattttattttttacagcgtaattctcgccgaccgacgcacccgttagaccggtgtgtccatgacttttaataaatgttaaaattgacccctttattatccttcatttacataatcatccttgtactaacaaaatttctctaatttctagcattcattttgttcgtgtcaaccaggccaattcagccggtttaattaactttctttaaaatgctattgataaccagctaatgatggtttagtatacgatttgactaccaaactacattagctaagtttttttaatcatagaaattttgaatagcaaaaaacttattacatagtaatatattcagttacttatatttcatgatttagcttatatcactgttatcatcgaaacctatccagatagttttaggcatgaccacggttacggttattacggttacggtttattaaccaccgtatatgattataactttttttaaccttaacattaaccgttatatatacggttaaaacggttacggttaaatacggttatggttagatacggttacggttatttgataattatgatataattaatatatgagacaaaatattatattaatctttataataaaataaataaataaatagtgatatatcaaataataattattttacgtgattatgtgtttcaaatatttatagcgaatcagctatctattttttttaaataaaccaatgaatatacaaattaatggttataattataatgatttaattaattatatttttcaaacaaaaacaataataaagaaaagatgttatgagcactaagaaacagtttttagagtataaataataataatatgaactacttatgatttgatttatggtaaaaagagtagtggagtaacttcgatcgtattagtgggcatattaaacgatttaagttactattttagtaaaataattatttatttagaattatacacagttacaactatatttttaaggttttaataatacggttaaccgcgcggttaaacgtacggttaaccaacggttttgatacggttacggttattatatttttttaaccgtaatgaatctattttcacggttaacagttacggttattaaccgttttatacggttacggttgggttacggttaataaacggtccgattacggtccgaaatacagttacagttagattttggtcatgcctagataattcgcaactctagatttttatagacattataaatcatccacatatatatgaatcagtaatccaaaaaaaaagatctgtaacatatggttttctttcgttgcgttttaaaatatccattttatttagcatttattaaaaattctcttcacttttttttttttttttggaaatcaataaatcgctttaattacgtggaataaaacgtctaagaagaaggatagtcgttagttagtagtgataactgatgcataaaatataacttgggaaataggaaaccaaatagtgttggtacttggtagatagtctctgataaataaaaagatcatacatgtcaaagctagccccgtttataaaatttgtaacagatttgcatttctcgatttagtagatttacatgagataatatcttgtgtaatcggaaataaaagttatcctaacaaatgagataatcgaaattagaggaggatattaacatatttatccaacaacggatataagcccctcgtaattaaccttgcgaaattaaattataacaaatcattcattaatacatttcgattttggtagatttgcctaaaaaattatccatgaatggtattttattgaaaaagaaagttatccaaaacaaacaaaatattcggagtcaaaagaggaggattaatagtatcttttactccccttaatagtactatcttaacaacggataagcccctaataaattaaccttgtgaaatacgtcgtctaggtcccattgaagaagcataaaatctggtcaaaaacattaatcactatttactctaaatctcaccaaatcataacatatatgtaaacaaccaatagaatattacgattaaaaaataagttaccaaacacagtttagatatcttatctgatcaatctttaaatggataaatttgaatttgtattaattaaaagtcttgtggatttgactaaaccactcaccctaatacctctatataaacccttgattctctctaatacctctcattatatccaaaacataatctctctctatctctctctattttgctcaatcttaatcgtccgatcaaaacactccgactaaaaatggctgcatctaacggcgagaaaagcttgatcgtgagcttcggtgaaatgctcatcgatttcgtcccaaccgtctccggtgtatccctcgccgatgctcctggcttcatcaaagcccccggtggtgcacctgccaacgttgccatcgccatttcccgtctaggcggtcgtgccgctttcgttggaaaactcggtgacgacgagttcggtcacatgctcgccggaatcttgaaacagaacggtgtctctgctgaaggtatcaatttcgacactggagccaggactgcacttgcgttcgtgacactaagatctgatggagaacgtgagttcatgttctaccggaaccctagtgccgatatgctcctccgtcccgacgagctcaatcttgatgtcatcagatctgtacgttatttttatttttaattaatatatgacacgtaggcaaattcttttttgggtccgtgtctcacatttaattagcgaacggtgctacatcattaacgtaacggttgttggtatacgtaacgtagatgtcaagttaggttaatgagtgctctgttttgtttttgttttacacaggctaaggtgttccactacggatccataagcttgatcgttgagccatgtcgatctgctcacttgaaagccatggaggtggctaaggaagctggtgcgttgctttcatatgatccgaacttgaggcttcctttgtggccctcgaaggaggaggctcagaagcagattcttagcatctgggacaaagctgaagtgatcaaagtcagcgatgaagagcttatgttcttgactggatctgataaggttgatgatgagactgctttgtctctgtggcactctaatctgaaacttctcttggtcactctaggtgaaaagggttgtagatactacaccaaggtaatggttttcgaagagtttttctttcttgtggatttgactttaccattaatgttacttaagttgtgttcttgtatgtatatgattacagagcttccgtggatctgttgatcccttccatgtggatgcagtagatacaactggtgctggtgattcatttgttggtgcattgctttgcaagattgttgatgaccgtgctgtgcttgaggtatataccaaataattcatcaaatcattctgcaagtttttatagattgttttcagattcttgactgtgttctttcttgctttttacaggacgaagctcggctgagagaagtgcttaggcttgcgaatgcttgtggagccatcacaacaacaaagaaaggagctattccagctctccctacagagtctgaagttcagagcctcctgaaaggaaactgatttcacaatgtctggatttttaggacttcaagttttaccttttcttggctttgttttttattttcccctgcttttggctctgtgttcttgtagaaccgttctattctgttatgaatctcgttttattccaattgcaaggttttttgtcgtttgagtaactttgatgaataaaaactctttaccaagttcagtgaacaactgtctgaaatgtaaaaagcctcaaagcacaattgcttgaggataacattcagaaacttgcaaatctaatgatctccaaatgtgtttgcattcttcccaccttgaactcatcctctccagaaatttttcagcccacacttccttgctaccttccatactcagatcatatggcactgaaaaactgagtcgattcacaaaacacacttttacataaacatttttgcttaggcagtaaagttatcatcttggttttgaagttcttataccttgttagctcttctaaatgagagtccttctcggtggtaccattcctaaaatatcttgagttagacacccaagtaataataagatacttgagttacaaatatacaatagcttgcctgcatactagaactttgaataggcggagggatttggtggataggttgtagattgcttcttctatgtgatctgtgccaaatagatacacaactggatagtccagcagccatctgcagatacagatagaacacaatggtatgataaattgaaataactaatggagtaatggtggacgaatcttaaaacgaattgggcaattacccgtttaaggttgggattgtaactttagtgtcttgtaaacaacagctaagatcaatgcataaagaagtctgagaagagttggcctcatcaagtaccgtagtggtatcagtattgctgtcatctaaaggaaatgtcgaagagaatagcttctgaatcgatctaagctgcatccccagattgctttccttgctttgtgttaccatcttgatacaaacaaaggaaaagacaagataaatccaacgtgtattgtaacatgaaaagagaaaccacttaacaaatacaaaagctttataaaaggaacaacctttggaggatcttgttccaagtcaatgaagaacaactcgggttctgaatctaagctggagcttacaaacttgggcaggcttcttacatttatgaggtatatcatatcctctataaccataaccttcagatctttaaaaactggtaaaccctataagaaaaaagcaggaatcaaatcagctacaaatatactcaagtactaatgtgcttgaagaataactagagcctaacctctcggatgagctcaagaagtgacagcaaacgattctgtagctcaggcatctttccaccatagtcaatcatcacaactggtctcattcctgtgcataatgccagaacatctggtccaagaaacccgatttagcatcgtttacagattcaagcatatgacaacaaattgagataatactagaatctagtgttgatatatgaacgctttataatgcacgaaatggctttattctttgggttcttaaacagagcaatcaaagcaccatcaaacttaagaatcaatttttcgttcctcaaggaattgttaagagcatatactcatataaactataacccaaattcccaaattgaatcatgaatatcaaagagtcgcaaaacataagaaaaaagtggaattcatgagacctatttcgagacggcgtttggaattgctcttgagtctccatttgatctgagagaggcaagaactcagaaactgaagtagttcctcagagcttggaacctccatattcgcagaaaaattggagctttcttcttctctgtcgcaataagactcagtgataccctttctctatcggacgttttgttcttagaggaaattacaatatggaccctaaactttctagtttctcataacacaccctaactttaaaataacaccaattatgtcacccacgtgtcaagttttcacgggaggggtgatgacgaagaacaacgtattttcacacgtgcgaacaataggcttcacacgacttttctttcgttatttttttccacattggatctaatcacttttgcaattcaccggaacttagccgacgagcgctgatcaaatcaaccggagaagcaaagctatagatctactatctccttcacagttgctatcaggtctgtgttcgtcttcatttttaccaaatcctgattgttacaattttcttcgttttcttctgtgtttatcttcgttttcttcggtttaaataatgggatatttcttgtcgaaatctggattctatgcgcatgtttagtcacggataatatcggaaacccctggagtatcagcaatgtcgtaatttttctggtttgcttagtgaattctctgtgaaggaaatatagaaaagaaagtagataacgtgaagaaattgttgtgattgagcaataagagatagagagaatagaagtaattgatggtttcttgagtgttggtgatattttgatggttggatttttttatgtataaagaaagcttataaacaagaatcatgcaaagaaattttgttctttatgcttatggagtttatagttagtcaaattattaacggtaagctctttgtgttggttttgtttgaatgtcagagatgtataataatatgggaccccggcctggaatggcaatgcctcaggcaaatcctcagcctagcccatttgggaatccgttctctggacctggctctggacttatccggagtggcttgggagcttatggggagaagattttcggttctagctctgagtatgtgcagagcaacgtaagttactcctatctgtcactctaggtttttccagtctgttcattacttggcgtttcatttgttttaaccggttgaaaattaacagataagtcgctacttctccgatcctcaatactattttcaagtgaatgaccagtatgtgaggaacaagttgaagattgttctacttccattccttcacagggtaaatctcacttttttggtatgcttttttctttgtatttggggtctttctcatatgagttttgctgcgacctcagggacactggactcgaatatcagaaccagttgggggtagactttcatacaaaccaccgatatacgatataaatgcaccagacttatacattccgcttatggcctttggcacttacgttgttcttgctggtttgtcactaggactctatggaaagtaagttctttatttatgttgtaactattctggtttaagtcttctagagtgccttttcaacattttgatccttctgaattttctaggtttactccagaagctctgaactggctttttgtgaaaggaatggttggctggtttttgcaagtgatgctgctgaagataacattgctttcacttggaagcggagaagcccctctcttggatattgtggcatatgcaggctatactttcacaggcctttgtctagctgttcttggcaagataatctggggatactcttactatgttttgattccgtggacctgcttatgcactggggtattcttagtgaagacaatgaagcgagttctctttgcagaatctaggagttatgactcaagcaggcatcactatctcttgatctttgttgctttagcccagtttcctcttttgatctggcttggtaacattagtgtgaattggctcttttgaaacgcattacgtttatattgttgtgaaaaacacctctgaggttatgtagcagaatttggaatgtcctcctgatggatatattatatggtagttgagcttttttggtttagacttctgtatgtcaaacatcaatatggaaagaaaagtgttatctcccttcccttttctgaatctcacttttcatatactacatttctaacatgattgaaaaccgaacaaggacatgaaatttgctttggtaattatgctttctaacagaaactgcttcccatgcgcttgatctctactccaagctccccagcattgcattggtgcattgtgattttggcttttgtgttccttggcagatttgaacattcttaggacattgcagacagttgttcgataggtttcctctgatctgtttggtaatcttttgaaactcctcaggaagtatacctgacaggtagttgttctccaagtataagcttctccatgaattctccagtcttttcccataaatcctaggaatatcgccagagaacatgttgctccgtagattgatatcctttaggttttcataagttgccaggttcagcggaaggtgcccctgtaaatggtttccttcagcatcaagcatgcgcaggcgtgatcctgtaactttaataacctctatggatatgaactggttaaaagacacattgatgcgtgcaatctcagggaatgttaggatttcatggccaacggtgcctgagaatctgttctggctcacatctaaagacacaagctgttttagcctatgcaagggtgatatacgtcctgcaaggctattgaaacagagtgatagagttcttagacttgggggaagcttaggaagcattccataaagatgattgttaccgagttctaatacttgtagcttccacaagccgttgagcgcaggtattcttccatcgagatggttgtttgataggaccaggtgagtcaaacttctcaaggctgagatccttggagggatttcaccggcgatactgtttttcgacaggtcgatggttttgagctccttgagccgcgtgatttctgctggtatgtctccagtgaagaaattttctgctagtgagagtttggtaagtttccggagctggaacacagattctggtactggaccgcggaatctgtttttgttgaggctaaggacagtgagctcagttaggtttcctacttcatcagagaggaaaccgtcataaccgtcatcatcaagatcgatctctataacccggctagttgtgttctccagagggaaagaacacataactcccaagaacgtccctgagccttcacacgggtcttcagagaagtcccatgtgctgaggtaagaggatggagagatggaacttggatcaacgctgcgtattatagactctagagcttgaatatcagatcgaagagtggctgatagaactgatgaagggacaataagtgaaagaagtagaaagaacaaggacatgatgaatactaaggaagaagaagcagaagaagaagatggtagtattttgacagccattgttatggttcttctttaagaggaaagatggaaccatttctttttaagtgagtattcttgtaagaagaagaataaggagaagaagaagatcgtgttgaacctaattggaatctaacatgcttcaaagggttttgggtatgttattggtgagattcacatctttgtagcatcatcattaataaatgatatatcaaacaaaatatggattgactcacatttagtttttctttttccatgctttttccgttcacggacttggacaatatcactttgttacaataaaaatcacaaacaaagtgataataacttatggttattaatttttcatgaagttttactttgaattcaaacttttgtaaaattcacatgataggcatgtgtcagcttgaaatttggaagataaatttagaattcaatctaagaaaccacaaaactagaggtgatcatttgaccaattatctaagtaaagactattgaaacattccacaaaattttaattttagtaattcactatatatagacgtttgattttacatataaatacattgatgattcaaccaaaagatacagaaaacaaaaaaaaaaaataaaaccaaaaacagaaaaaaaaacaaaaaaaaaaacaagaaccatttaaaaagcttatcaagcacaatggccatcgaaaagagaaccatgattgcctccttcatcatcgttctgatgatggtaacgatgatcgcaaccaacgttgaggcccggaatcatgtcaaaatcaagccaccagcaaaccccaagttcttctttttctaaattgatggctcataatgtttacaagaaataaatggttggcttcaacaaggagcttcaagccttcaagcattagttaaactaatgtttactttttatatatatatatatatatatatatattcactttcatcctcttatttgttttagctatgggtgagattatctaaataaatttttataaataataacatttatacttgaataaaataaactagtttcaaatttcagtcacaaagatttattttatgttgtagctagaaattaataacaattatcatttatcaatatatttgtttttagtttaaagagggtataatatccttaaattaataatattagtaaaattgtgttatttagttgtcttgtgtctcgatatataaggattggttcgttccattgtaacttaaatgatgaataacaacaacgtacgtgagaattagaatactgaaaagtgaaaactacatagtgtttaaataattgtcgtcaattgctggaatacatatttgtgcgccaaaatttaaggatgggttcaacaacaataaaacgaacatagttttgatattgtcattgttgttcattgataacgacagtaaaaacaaaaggcgaacattctttttatttgtttgtaatctagtattaacagacgatcaaaaacatgaatctgtaatcccaaatttctaataagttgacaaacgatctaccatgtttaaatttcaattcgtccaaatttgttagttattattttggttacatgatatataaccaaagaaaaaaaacaatttggttatatatattatgtagctgacttgatgaactttagaaattgtaaacggatttgtctctatttatttggatttcaggcagcttatgtatgttagaacatcatgtgaatgttagacatgaacgtaaaagaataacatgttagctagggactaattaccaaagccatattttgaagaacaaaatcaaaatgaaagtttattttgacaagaataatagcaaaacattatttagctattttttttaaaatggaaatctattatatcagtcatatttagctatgtttttcgaaaaaaaaacattattgctatgtgagaaattcaaccgtgatcctataacattttttcccacaattaaacattgaattttcctattccagattttttatagctggacaaaagaattcatggtgagaggcccaaggtctattacgacctaggcccagtaccacaagtcaagccgacacagacaaaaaattggattcaatgtttttttttctgactcgatttggtgaaaagacgaaactttctcctggaaaaatctggaacaagttagcgcgaacacgacgaatcgaatcagagtcccaaggaagaaaagatctctctttcatccttctggagaattcatatactttggtcgattggttttagctgaaaaggtctctgctttgagactaattctcagatctgtgtattgcttgcttgcatcgctttctacctcattgtcgatttggaggagggaattgagcattgggtttagcttcttaagtatgggaagacctttgttttatgatatcattgagaaaccagcaacgagctgtatcgtaacgttatgcagtgtgatttggtttgtgattcagaagaagagtattgggtactctcaagttggattgagttacgagactgcaatcgaagggcattactggaggatgattacatctgctttatcacatattagtgtcttgcatcttgtgtttaacatgagtgctttatggagtcttggtgttgttgaacagctaggtcatgtaggtcttggcactgcttattaccttcattacactcttgttcttgttgtgttctctggtgttttggttattgggatctatcatttgttgattgctagattcaagattgattattttcggcgagttacagctgttggttactcttgtgttgtctttggttggatgacgattctctctgttaagcaaccttcttcaaagctgaatctttttgggcttttgtctcttcccattagctttgcgccattcgagtcactcattttcacttcgatcattgttccacaagctagttttctgggacatttgtcgggaatccttgttggttacgccatttcgtggggtctgattggtgggatgaacaactactgggctcttactatgcttggttggattgtagttgtctttgtgttcagtttgaagaaatcgggtgcttatgatttcagttttttggagatcgaatcgcttactgatgcttctttaccctcagtgcggtttattggaaatggccggaccttgcaagccagtgcagttcctcttagtggagtggaagttgtctgaattcagttcatggtcaatattgtatttgggaacaagttcttgtcatcgaggtagtagatgaagactgagagttggtaaccaagattttgcagtttcaagttccaaccaaatttaagagatcctcaaggcttgcttgaactgcgtaatgtggtgaaaaggattaagcaagctagtgttgtttaggcatcattacagatgaatatgacacagtcaattcttttgtcatgtggttgatgtatagttgcaaaagggtcccatgtcttacctaaagattccgtccactagacatgtttcctcatttgtgacattctcctttatttcaatacgaaagcatgctaccaacagtcttgtattactcgtttttctttgatatattgaattggtgaaatagcagaacgatatattatttgcactctttcaagttcacaaggtaattagatgaagttttctgcaggtctcttggactagagcagtgtcttcttttgttattagtttccatcttctgtcatttccttgttttatattccaaaaagagaaggtaagagaagggtagaacaatcaccgattcacagtttcaagtttttatttatgagcagttttggttagatgattattttgaagctctatctcaaatagagtcatgagaattgtatttggtatcagagtagtctaacttagatcaacttttgactagttgtttgtttccattgaacctactttcaacccaattttattcacaagatctgcatttctctgcacccacaatgttttacattgcttatataatttgtacattgatcaggtgaatctgatcttactttctggtccacctctaagcacttttaaatggagaagaaaggccagcatggtacatatgaatcaatgatgactcatcatccgatcctctgtatcattgctttatctgtacttttcatagcaatcgacccctttcacatgagtccaatcgggggtcgtgagttcaaacccgtgaagcatgaggttgctccatataaggaagtcatgggaagctggcctagagacaaccttagtcgactgggtaatcatgggaaactggagttcgtggaccaagtctttggtccagagtcattagagtttgatagtttaggtcgtggtccatacacagggttggctgatggaagagtggttagatggatgggtgaagcaatcggatgggagacattttcggtggtaacatcaaaatggtaagagattacatattcatcacttcttttttgtgcagagagttttgtttcagtttttcttattgatgtgtgttcatgagaattaggtcagaggaagcttgtgtgagaggtgtggattcaacaacaaacaagcaatggaagcacgagaagctgtgtgggaggcctcttggactgagatttcataaagagacaggaaatttgtatattgcagacgcttactatggtctacttgtggttggtcctgaaggagggattgctacgcctttagctactcatgtggaaggaaagcctatactctttgccaatgaccttgacatccatagaaatggctccatcttcttcactgacaccagcaaaagatatgacagagcgtaagacaactctcttattcttgctttgtatgtcaattcctaccgtaaattgtatgatatagaaattatacttgtattttgtaggaatcatttctttatattactggaaggagaatcaacaggaaggcttctaagatatgacccacctaccaaaacaacacacattgtgctggagggtttggcttttcccaatggaattcaactctctaaagaccaatctttcctcctcttcaccgaaacaaccaattgcaggtatgaccctcaactttgtgtttatatagctgtatctatcattcatttctcttcatcattatgtgtatgacagattggtgaagtactggctggagggtccaaagatgggtgaagtcgaggtggtggcagatctcccgggattcccagacaatgtaagaataaatgaagagggtcagttttgggttgcaattgattgttgcagaacaccggcacaagaggttcttacaaacaacccttggataagaagcatctactttcggttgccaataccgatgaagctgcttgcgaaaacgatggggatgagaatgtacactgtgatatcgagattcgacgaggaaggtaaagtcctggaggtgctcgaggatagacaagggaaggtaatgaagctttggattggaacagtggctcataaccacattgccactctaccttatcctttgacaatgaatcaatgaaggactttgttgtgtagttcctgaactaaatcatctctctgtaacttaattatcttcgttttgattcaagttcctttggaccggtttgtcttttgttgatattatgtgtgaccttagattcctcatgaaattctctttctttctttcttgagtctctttttttttttgtttggttcacgtcctatggaaggcttcataacttgagccatcgcccagtcttcttcgactcccgcgaaatagaaaacaagagtatgcaatgaagaattgccttggaaaacaagagtatgcaatagagaaagtctcgaaagtgttggaaggttgaagataaagagaatacagagaggtaacggaaaaataacgactgctttttctccaaaatgatgacgttacaatcatctccattacgacgttttactcttttttcagtaactttttctgtagtttgtttggcatcacatagcaatgaacattttatgaaatctgtggtgtctgctttcttctcaaagcacaactatccaaaactccaaactgttggggccatatatattactaaccaagttgatagcaaaaaaaaatacaaatccaactcataatttagtcttgaagttataagaaagaaactcaacggaagtctgaatcatagtcattcaaaagacagcagaaagggaaaaaacaaaatcatctaagacaagggtatataaaaccatgatagatcctgatttcataagatcttcaaaggtcttgcacactcaaacctgaaataaacaattggcaaattcaacttagatagagatagacgcatgcgttcatggaccaaccaaaaataacttgtgacctaaacatgccaattaaaagtgtctgaattaaagtagattaaccacaagactattcgaattcaaaaaccaaaatccaacaatattatgacactagaactttcaagtgatgaattactcaaagctaggaacatctatccaatctaacaaatgttatgagataagaggtttcaagtgtgtaatgtttgggctgagtcacagagagagagagagagagatagtgaacctggaggaagagactgcttcaacttatcggccttctcttggtcgaagacacatagtgtgtagaggtaccttgagcacctgaccttgaacttcacaatgtccttgcttctcttgatcttcacagaccttgcatccttccttctcgccgtcaaaaggaagtccttgatctcatggatttgcttcggctgcagattatccaaaccaacatccattttcaatcaatacaaaacaaaacagaacacacaacaagacttcgacccaaatgttactgcatgatgaacacttcatacatttcaagatgaaacttaaaccaatgggtcaattacgaggaagactctaatctactagattatcagtaaccaaacaagaaacccacaataagagattgattactttcagctcaatcatgcaaactttactaaaatcctagtcgtgagaacagataatcaaacaaataatatttagcttcaataatcctcctgagaataataaaactgagaggcgaagaaaactttaccattgtcggatctgatttagtggctgcaactttcttccactcaagagaacaaacagcaaaagcaagaacccagcgtctgaaagaaatagagaaacctaaatatgaagaaaaccctagactctcatatacgcgaatttccaaatgtaccccttaggcccattaatccgaaaagttggccattgggtttagtggcccaagttgttttgtttggcaaatttcaaaaaactcggatccaataagaaaagggtatttaagtcattgcgtctatttgcctatgatttcaacattagcgccacaaaatgttttttcccgctccactaaaaaaacacttcttcctctctccaaaagcacacaaaaccctaccgcttcgtctctctctctttcgctctgcagtttcctattcaaaattgattggtttctctaaataatgtaacaccttcgattcgataatccttctctctcaaatcaacttcagtatctccatctctgcttctttagggctccttgttcgaaggaattaaaatgttttattcacatacgcttttggctcgaaagggtccattggggacggtgtggtgcgccgctcatgtgcaccaacgcctcaagaagtctcagtacacctccatcaacatccccgacactgttggttcgtctttcctatcttcaattttcgctttttgatccaaagttcgcttcttttttttttgaatcccctttgattgtatccaattcgaaatttcaaaaaggcaatacgaatttttacatgggcattcatcaaattccgattttgttttttatatataacccattgtagtaattgaaattctctgctttaataaagtttctgacttttcgagaattttgcaattggctttgcagataatataatgtttcctgaagtaccattggcattgagaacgtcaagtcaccttctagttggggtagtgcgaatatattcaaagaaagtggattatctttacaatgactggaatctccttaatacttgggtagctaaggctttcgtttctactcaagttaacttgcctgaggatgccagacaggccccgcctgagtctgttactttgcctcaagcactaaatctggacgagttcgacttggaagatgacactctcgacatgtattcttctttcttgcttttatttgagtttttatctgttctaaagcctgactcatctttaacattcttttcttgtgaattctagggaattcgataatcatactcggagtgaggaagatatcactctcacaggtaccttttgtctgtgttttttttccttggttctagatgcagcataccatgattttgaggtgtttatgatgttgatgcttatttttcagatcaaattcctactggcattgatccttatgttgctgtaacattcgacgaggtgagattactgcttgcttcttatgactttgaagttgattctgacttcttgtttcccatgtctccgagcacttgttattgaatgaaagtttgtatgcctttcttacaggacatcatctcagaatctatcccgatggatgtcgagtgaggctcttcatagagttttgatttcctttactacaccttgctcttaatcttccttatctgtttagttgatcttctttaataatgttgttacatatttttttgctttgagcagccaatcaacagaacctgtgagtaggcataccggagaaattgatgttgaaacggctcatgagacaggaccagacaatgagccaagagactccaatattgctttcgatactggaacctatagtcctcgtaacgtcacagaggaattcactgaagtccaggatcctagacaaagtaacttgacagaagagcgcattcccaattccgagagaaacgatgccacttctcctggaactgttcccgagattgagagaatgcgtgacgctgcacatgatctaagccccacgtcccatccatcatttgctgcacaacaacaggatgtcagagttgaacgcactgagtcattggatgaaactttgaatgagaaggaacccactatccctagtattgatgaagaaatgttaaattctggaaggcattctgcgtttgagcttcgctcaggatctccaggttctgctgctggttctgaggaagaacgtgcagattttggtgagctagcaacatagtctgataatttgaagcttaaccactacattctctctcttattatctatttaaaacacttttttctttatgttaagtgcatccatcacctcaactggtgcttcagccatctcctcctccccaaccacaaagaagggcaaggaagaggaagaactttgatggtgtcacagtattaaccaacaagtaataacttttccgttgcttcatgtggctttgattatttcattagctgttccgtactgatcaaatagtttgaacaggaacataagtgaaaggcttaaggatcctagtgatactctacgtaagagaaagaagatgccttcatccaaattaaagttttggagaatgaataaccagtcaaggaaggatcaaaatttcaatgagcccttgtttactggtaactttctttgattattattttattttcgacagttttgccttctttttccctttgtttttgaagaaagattattgcctgtatgtgtcaacctgcaggcttctcagatgatttacgcaatgtctttgaaaaggactatgtagcttcaaagccacatcttgctgtttctgatgaaactttaccagaacctgcatctgtatctcctactcgagaagctgaagtagaaattaatccggtctctccaattccagattctactaatccagacagtacagttcagctatctccagcgcagcaaactgaagatgtcctagactctgcaggtcctcgacccgcgcatgcagagtctgtagcaacagaagcacaatctcctcggacatttgataacgatgacatgggaatagaacatttaagggatggtggtttcccggtgtacatgccgtcaccacctccaagatcttcaccttttagaaccgatgacttcaccactcagtctggaaattgggagacagaatcttatagaacagagccttcaacttccacagttccagaggacttgcctggccaaagaaatttggggctttcacctgtttctgaaaggactgacgaggtttgttctcgcatgttcgcgtgttttgtttttaccattcttggtgcgttgctaaccttgatagcaataccatttgcatgtgccatacaggaactttatttcctggaggtaggtggcaattccccagtaggaacaccagctagtcaagattctgctgctttgacagggagagcaaggtatatatattcctaaaaccatgtggatttcatttaagagcctactgtttctctactaacctgtaacattcattgaacattgcagagccttggctcagtatcttaaacaacgttcttcaagtagtcccaccacatcaagccatccttctggagatctaagtttgagcgagatcttggcaggaaagacacggaagctagctgctcgaatgttcttcgagacactggtgagtgattctctgtacatatgtttttctttgtatctctgtagtgcctcgagcttagacgagttgtttttgaatttgcaggttttgaagtctaggggacttatagatatgcaacaggaccgaccatacggagatatcgctttgaagttgatgcctgcccttttttctaaggttcaaacgtgaataaacaatgcttaataaacttacttatgtatattattaacattgaagctagacgaggaagtagtcaattcttaattttttgagccctggttttattacattgtgtacaagtaaagcttcaccctaagagatggacaaacgtctaaattccatcattagccaatacttcacttgagttcaaatttgacaatgttgtaaaaaaacaagtttttgagattctctatgattctggaaatgaaagactagcacgtgttgtgatggagtgaattatggagctagatgctctcaagcctcaacatgtgtagatgctctcaagcctcaacatgtgtaccgatggaatcaaagatatcgatcacataaattaacggagtatacatagataacctcataaatgttatagcaaaaccttcttcaaaatctaaagacgacctacctattctacaattgttcttcttttgtatatcttagcagactatggaaatctagaaataatattataaattataggtggaatctatcgtactcatcagtcatcattctctaaggggcatgacaggaccattgcataaacttggtctttggctacagttctcatcatgacttgtaatctcttctgggatttggttctccatcgcggtttgattctgtatctcatggtgtttatgattctgagactgaatgtggctctcaatcttgattacctgattctaataaaaggtatgcagttcgatatgaggatggaatattgccagatgcaacaaaactatgtatactttatccctaagtatgaaaggatacgctagtaaatgaatgcactgagatataacgtttcaattcatatgaaggaatttcgaagaagaagaaaagaagaatcaacttgttgagcatctaaccttgtacaagtatttcttacgaagttttatggctgtgcgtatgcatcttctcactctaattgcaagcagcttgtcattacaaatctgaaaatatctaaaatcagtaagaagttttatcgtagtataaaaagtacaacagtagtattcagcaaagaaacaaagcccaacatgcacaaatgcagtgaaaaacatcctacctttatcatgtcatcgatcgagcgagtttctttcatgattttatgccgattcatgattagaatagccgccacacaaaagactggaagagggtcatctcctttcccacaggatgaaactacacaagaggcatgggttctttcattcctagaccataaatttcttgtcaagccacataaactgtatgaacctgctggcttcatcccaaaatcatcagacagcggaccagtttttggcaatggaccactttctggcagtagaccgctcttggacaacagactgctctttgaagtccggtcgctctttgaagttgattcactatttgtagttgtgccatttccatcatctattttatggtcccccatatcaactccagatcgttttggaagctgaacaaccaacggcttcaagcaatccttctctaaagtttcagcaaaagactcatcaaaatcagcagcccacatcatctacaacagataaagatccatgaatacatatgcaagagttttgaatctggtacgtgaaggcacatatgtataataagaaatccaagattctcttttctaccagtctcttgcaaccactacataactaaaatccatttgttatcatgagtgagacacaaattctagtaagggcctgactggtttaaacgcggcggctgcggttgcgggagtttgcggaaacggacggttgcggtttcaaacgatatcaagcgttttcaacgactggttgagcgtttgataatgggtgcgtttgcgagagttttatgactggtaaaccagcgggtgcaatagtaattaaataaaaataaccaaaataaatataatatattactataaaaagaaataaaaatacaatatattattatgataaattgataatattagaaaagttgaacatgcttaataattaaaaccataaataaaactctaaattcaaaaataaataaattttgtaagaaaaaaacttaatcctttatgtatttggtacatcaccaaaaattgtatcaagtagtgtgatacaaatcgaaacatgcattcaatcaaaaaactcaaaagaatacaaaataaaaaaacaacgatgcaatgaaatacttaaaaaattatactagctaatgaatggataaaaagatagatgatacttaagtttgattattgattttgattttcatcagtttgggtgaatgtcataattgagagaataaggttacaatatattataatagtgattagggtggaagccaaaattattttaattaattaaaaaataaattattttaattaattagaaaaagaattatttttttctaacctaaccgctaccgcccgcaaccgcaaacgcttgcggaaaggagcttttgaaatccggcgatttcgagcggtccaaagcggtatttagcggtttctatgattggtgccaatcgctaacaaccgctaccacccgcaaacgtagcatttgcgggtgaaagagggagaaccaatcaagccctaactaatcttaatacaataatttaaacagctaaatcaaagtcaaaatttgtaggtaaggaaaaatttccaactttctactctgctcaccgcaagaaacctatcacaactatttaactactttgtgggttataagataaaggaacaagaaactggcaacacaaagcaaacagcagaagaattaccaacctcccacatcctcagagccttgttaaaagacaactctcgtcgaaacaacactaacagcatccggaacgcaaagtgaaggctttcagcaccaatacgtgataggtgtgaaaacatttctttatctgtgagttgcaatatacgccatagtgattgcaattgatccattactccagttggtccctccatctggaaattagcacgctacagtaataaccacatagcaaaagaacatcatattacaccacagcctttgtcacttgctggtaggggaaaactaaaacacatgttacgtatcagtaagcattggaataccgttcttcttatgagcatttcaaagcaccaaaaggcgtcagcattatcttcaaaaagaaatacaaatggagacactaaatcgctcattcctgtccacagattcgcaaccagacagttagtatcctacattagtatgaactcatacgagcgccgttttataacacgttacaaacccaacacaagagagatttgggaccttggcaataaccagttgcaggatcaacccaagcatagaccgcaaggatatctgacattctacctagatttcctggatcctcatagaactcaaggtggctatctgtccttaccacgtcaacaactgaggaaacaaaaagcaatttttaattcggattagtgaccattaatgtgcagactgaaactgaaaagcaagacttcctgtaagatcttgaaataaaagaaatgcgcacaagtggtacctatccggtgcaatgtccaaagccattcagagactcgatcttcctttacagtcccaccacgagtatgagtctcccttgccgacggcgtttcagggacatctgatattctcaaaccatcaacaatctctgacgtgcagacagaatgagacaacttttcaacagattgaagatgtacaacttcaatttctgagttaatagaagcagttacatcattataagaagacccatgcggttctataactaaatctgcattcttgtcaattcgaaaactgtgcattctctcatcctccgatcttaaatcactttgcgttgaagtttcttcatctggagtagaaagtcctttcttgcctaaactactcctcccaaacaaatctgtgaccggtagagagggaaagtcaaagatatcatctgcaaatggaccaggggaaggaaagccatatggactggacgggggtacaaaagaagaagtttcatatattgtgctatcaggactgactaggtcaactgactcactggagcttccacttctgcgcacaggagatttttcagtatcattattactccaatcaccgtgattgtcagtgttctcatgcccatctaaacaagcttcccggctttcatctatatcctcctttactacctcatttttgtatgattttcgcatatccataactttagatccgacaacataggcaagtgaaccagttcccacagtcgaatgcatcatctggcattgcttgagcagctcattgtatcgttctctgcataaattatgaacagcttattaagctttttccataaaacttgagtttcacatagcactccatcacgatacaacatgaaagcaaacaaactgcccaaccttcgagctaccctgagttgcgtacgatactcagaggtgctgcttaatgcataacagccaaggagaaattcccaaacttcagctcttatggatggatcgattcccttaaaaaaagcacaaaggaaatgcattagaataccatgttaaagaacaaacaacaatgggatagcctgagcagctaaaaaatcatctgcaaacatacccccaaaataattaatttgagcgccttgtggaaactggaaacctttccatcgccatcgaataaagcctgccacttctcaggcttaagcattttgccaatctgtacatttgaaacacttataatcatcaatgctacatctgagtaaagttcaagtaaaaagatgaactagagagtgaaagaagggatcttacagtcaaaacaacttgtatgcgagattgtgaaagacaaggctctctcagatcccgaaccaaagatgccactttttgtagacttacaagaccagctttccgacgagtccatttctttccctctccagcagaaaacatcagtaatcaaaacacacaaacaccaaccctccctccccaattcccacttgttccttcacaaacggaatcatccgttctcaaagcagcccaaaagcagtacagaaacctgcaatacaagagagtaaacacagtcaatatgtcacatataatggacgaacacacattgctttatctgtcattgacaatcaaaagatagataaaccagtgaccaatcgatatcaaccgatacccgaaagcagcccaacacaaaaggaatctagaacgagaacaaaaaaaaaactcactttaacgacatctcaataatcccagatagaaaaggtttgaaatttgaaaacttgatgacatagtaatctacaaacatgaatcattcgatcccgttcaacagaaatcggttcctcaaatacatggataaatctaacatcctttgatgagcaatgaaatacataaaatggtgaatgcgatactcaatgcggacagacatagagagaacctgtagaagaagatcatggaggacattcttctccggtgaacattttttcttcccagggaaagtccgttgatttatccctgcctgccttttctctctttctctttttctgtgtttcgcaaaagtttctctttttaatttaggttgacatttcaattagtcaatttgttacactttatcaagaaacttgtatttgttacgaacaagctgaaatgaaatcgacaacaatattgtttgactttgttgttgatcatccaatagataaattttaagaaataaagggaaaaaaaaactatatttgttgaattcttcttaatttcacataatgggccttaaggatccatatttcggcttgtatgtttaggcctgttttggtttatctaagatggatggtccaaagcttaaaaagactacagcgaacgatttcgccagcaacatataattaatatcgctaaaagaactgaatccccatgcccgttgataattggtatgttatgcatttgatcgcactagattttttgatcaacttgatctttttattcttattaaattttgacggacctagctagctttattttatgccagtgcgaaagatactaatattgaaaattgggtggtgagccaacatagcacaagtggcaaaaggcaaactactgaactatacattaaaattttgtgtatactaaaaatgtcttctcttctattaaatctaacaaagaaagggaaaaatagttaaggttacgtacttatcaataatcaatctatcattcgatgttagaaagcgaccaacgtcataagttgacattacctgaaaaaagaattacagtggaaatcttctacttcgacgacgcgcgttaacatttgtatatatatattaacaattgtaactttattaaagatttctttactttactgcgattgaatattatgatgacttctttttatttattctttgtgcaaacgattgacgaaagaacctttctatagtataaaagaagtactaaaaggtacacctgttctctaaacaataaacatgacatgatatatgaatatacttctgattaacagcgaacatggactaaaataaaatactcctctctttttctgtcgacagatatttttttatctacatatcgttaaatacttgaattagtatataagacaatccgatgttttttttttagacaactaatattgtaattgatttggaccgtttcagccatatcccgtgttattaatacagtatgcaaaccattttggagcgtacgatcttgatccgtttttttttatttattagaccttcgtataccctataaaaatttgaaattgagtatctaaactgagtttttaaatcatatacactgtacatttgattcaatttagacaaactagttacgtgccaacacgaaaagtaaactagatataaatatataatccctacaccgcgcgcataggtaatggaaaaactaatcacactaagaaatgtaaagaagggtttaaaaagtaaaaaagatgtccacagcaaataggggaacaagcacattgctacaagatacgtaaggtaggctttgtatattgttgaagattccacgtatggagctaaggaatcttgaaagagaatccgaatcttagaaagaaaaatagacggtcaggattcttcatatctctccactttaagaatctgttttaaggagaataacatgtaacgacaagagaaagtggatcattcgtgacataagcgcccataatttgatgtttactttaatgccccgggtaacacatactttgttgttctcgaagtatttgatatttcattgaatcctcttaattggagtacataagttctcacttctcagcaacgatgaaataaaaaaaaatgacaaaagagagttctaaaccacactaatctctaaattgtatctcaagagatcactatatgaataagccagctttgataaaagtttttaagtgttgatcgaaaatactgactaacgcttagatgattaatttatgtaaagatgatacaattattgtttttctatggtgtttaaatatttgtggtcttctgctatttgcaaatatttaattaattttcatgtgtattaaagaattgttatatctctgccgacagacgctcctatactatgggagatccaaagcaaattttaaactaatatgtggtctattaatttaaaacaaaatggcttaggtttaggatgatcctcggtattatatgcaaaatgcttaaattaaatataaacgaaagtaaacaaaaaagagtgacatatataagcagtaaacaaaaagagtattttaatgggaaaaaaacatatacaactattgtcattaagctcacgacagcatagcaaaatatatatagtcgaagattactgtatcaatggcaacaaattatatatgaattatcttaatcttaccgattactagtcaaaacactttgaatgtctccacattacccattttttttctatacttcccaaacctacctctgaatctgataatacagtaactacatgagtaataaaaagtctaaaaaagagaagagaaatgagtttatttccatatttttgtcgctttaaaaggttttgtttgataagggaaagtcggcatgagaaagaggagaaagtgacagctctctgataaaaagagggaatgaaggagaagaatttacgtcagattacgcaattttatgtcttccccaaatctaactgttgtccacgtgtcattttcctcttcactgtagatttaacttatcctcctttgtcatccttttcattatctgtattttttgttctttctttttctgttttgcttaaccttttctatatcctttttaaaataataataaaatctctatcaattcaatatttttttttgcagtaatattatttactgagagtcacctttaaagaataaaagatataaaaaaaatccaataataaaaaggtaattgtactttacttttcacattacgtcatccgtggtagtggggtcgattaggacgcatcattttttttttacggctcagtgactcacacacacacgccaaaagcagagtttattaaaaacagagtaaattcgctattccaatcaaaaggtgaaagaaaaaaaaactcaagagtctctcctccattaatggaaggaaccgtttctctttctatgtgctgattgctgatgtagctcccacgagctcaagagtaagcttctaccgcaatttcctctaactgaaaccaaatcggctctttactaattttacaataaagtttcctcttttatctttcctctctggctaattaaactttctcttcctcaataccccattcaagtttcaactcttctacactgtgtcttacagcttcatgctccaggtttaggtctaaaactcataatctggttctctttttttcggtggggtttgtttacttttgctactagataatgacttttagattccttctgtatgtcttgttattgttttcacgttttttttttaaccaaacaatagcaaaattgttacatgttttggatgttcatttctgtgatttgggattatttttaccttttccttgcggtgaagtttgtcctgtttcgtaatttgtgaacatatgaataatttagtgtttgtgattacctgctttgtgtaggatactgattagcatttctcaattgaatcaaactgctgaagacatctgtattacaaggaaaccaaaccagtcaggaaacaaaaagtctctgtctttggccatggagaacccatcagcatccagagataataaaggtttctgttttccagatattccagtagaagaaatggatggctgggttaagaatttgatctctgaagaagatatgtttagctcctcttcaacttcagagcttatgaatttcgaatcttttgcttcatggtgcaacagcccttccgctgcagatatcttgttcactcaatacggtttatcgacctctcaatctattatacctttcggaggcttagaaggctcatacgcttgcgagaaaagaccgttagactgtactagtgttccaaggtcattgagccattctcttgatgagaagatgctcaaagcattaagtttgtttatggagttctctggagagggaattctggcacagttttggactcctattaagacaggagatcagtacatgcttagtacttgtgatcaggcgtatctgcttgactcgaggctatctggataccgtgaagcgtcgaggagattcactttctctgctgaagcaaatcaatgctcttatccaggtcttccaggcagagtctttatctctggagttcctgagtggacatcaaacgttatgtattacaagactgctgaatatttaaggatgaagcatgcattagataacgaagtccgtggttcgattgcaattcctgtccttgaagcatcaggttcttcttgttgtgcagttctggaacttgtgacatgtagggaaaaaccaaactttgatgtggagatgaactctgtttgccgtgctctgcaggtaattaactaaccttatctctcttctctttgtgtatgtgtctttgcttcttctttcttttatctctcttcactcatgtttttgtctatgtttttcaggccgtgaacttacaaacatcaactattcctcgtcgccagtacctttcaagtaatcaaaaagaagctttggctgaaataagagatgttctcagagcagtgtgctatgcacataggttgcctttagctctagcttggattccctgtagttactccaaaggagcaaacgatgagttggtaaaggtttatggaaaaaactcaaaggaatgttctcttctttgcatagaagagacatcatgttatgtgaatgatatggaaatggaaggctttgtgaatgcatgtttggagcattatctaagagaagggcaaggaattgttggcaaagcactcatatcaaacaaaccgtctttctcatctgatgtaaagacatttgatatctgcgagtaccctcttgttcaacatgctcgaaagtttggtcttaatgctgcagttgctaccaaactgaggagcacattcactggtgacaatgactatatacttgagttttttttacctgtaagtatgaagggaagctcagaacaacaacttttgctggacagtctctcgggcaccatgcagagactatgtcggactctgaaaactgtttcagatgctgaatcaattgacggtacagaatttggatctcgtagtgtagaaatgacaaatctcccacaggctactgtatccgttggaagctttcatacgacatttcttgatactgacgtcaactctactcgaagtaccttttcgaacatctcctctaataaaagaaatgaaatggcaggttctcaaggcactcttcagcaggtatgatgatgcatctaatccattcatttactctaatatattttgatacatgctgctaggtatagagactgagtattgttgtatatcttacataggaaattagcggagcaagaagattagagaagaagaaaagcagtacagagaagaatgtgagcttaaatgttctccaacaatacttctctgggagcttaaaggatgctgcaaaaagccttggtggtgagaaactagtactagtagtgctctttgcttgtttcccttacaagattattcaattgctgatccttggatgtttttctttttgctttctttctgcagtttgtccgactacactaaaaaggatatgtagacaacacggaattatgagatggccatctcgaaagattaacaaagtgaataggtcactaaggaaaatacagacggtgcttgactctgtccagggtgtagaaggaggactgaagtttgactcggtgacaggggaatttgtagcagttggcccttttatacaagaatttgggacccaaaagagtctgtcttctcatgatgaagatgcacttgcaagaagccaaggtgatatggatgaagatgtgtcagtagagcctttggaagttaaatctcatgatggtggcggtgtcaagttggaggaggatgttgaaacaaaccaccaagcgggaccaggtaaaaaataataactacattttaagaccttttttggaggagctataagaatgtgaatatggtctaacaaaagatcattctcattgtgttcaggatccttgaagaagccatggacttggataagcaaacagtctggcttgatctatagtgatgataccgacataggaaaaagaagtgaagaggtaaacaaggataaagaagacctttgtgttcgaaggtgcttgagctctgtagcacttgcaggtgatggaatgaatacaagaatcgagcgaggtaatggaactgtagaaccaaaccactccatatcaagtagcatgtcggattcatcaaatagctcaggagcagttttgctgggaagttcatctgcttccttggaacaaaactggaaccaaataagaactcataacaatagcggtgaaagcggatcaagttcaacactaaccgtaaaagccacttacagagaggacactgtacgtttcaagcttgatccatacgttgttgggtgttctcagctctacagagaagtggctaagcgtttcaagctgcaagaaggtgcctttcagttgaaatacttggatgatgaagaagaatgggtgatgttggtcacagattctgatctccatgaatgcttcgagatattaaatggtatgagaaaacatacagtgaagtttctggtccgtgatataccgaacaccgcaatgggaagttccgcaggcagcaatggttacctcggaacaggcacctaagcatcaatgttattgtgcttaaatatgtacagataatctatgtttggtctgacattagttactcatgtagaaagacaaaaaaaaaaaaaaaaaaagggtgcagtggagttgaagaatgtatataaacatagaaagacacatcacacagatcctatatttttgtctcgaacaagtcgtagaagtaaatctgaatatatcagaaacgcaaggagatagaagctcaaatctgtggactgcagattagacatacatgttttttgttttgtttttgtcatcatcttcatgtttccaacttaatttcttttgaaatattctacttaaattaaagttgtttaaaatagggctattatattccagatttctttttaacagcttctagatttctttttattttataacttttggtataattattcattttggatctaaataagtttatttacgtacatccgatctaaaatagtttattgataaagctttctaattaactcatattttttttattttttttgtcgaaagtgaattttattgattaagagtgacaaaagtcatgatacaattgttcaagaatccaactagggggacaaacattatcagagtaatagttacaatggagacaaccctgtttagcaagtaaatgagctaccctattacactttcgttgagtgtatgaaaaactgatgttttggaatctaattaactcatatatattctttttttttaaacacccatttttttttaccataaatcaattgttccaatattttctttctattcaatttttacatctacagtaattattgtattatgagggggtgatttagttatctattttgaatgatttgagtttttttgtgagttatagatgattttgggtaaatatagtaaaattgataacttatgaattttcctaataacctagaacacttttttttttttttgaatacctagaacactttaaaatcattaaagaccaatcttggaaaaaaaaaatcaataaaagtggatttgaatatactctttcaaattcattagttcaatagcattggatttagcaattcttattataaccaataaccctagattttttattaaaaaaataatctatgataggataacatatgaattatcatcccaaacaaattaatttattgcttgccaaaaaaaaaaggtatattaatattgttactttttcattttattccacctattgttgttattattttgttatatctttatgtaatagtagtatactaacgtaagctataaaattctaatagaaaattcatctatatatatatattcttatgggggtgtaattgtgtaaactcgtccgtaacagataacataatgcaactagaacaacttccgtgggaattggaggaaagaatactcactttgattccaacaaagtgtctcgctctattcagatctgtttgcaaacgatggaactctctttcaaacgagagaaggtttatcaataatcatttggctcgtgcccatccacaataattcatcttgattgccagatccaagatttgctcggtggaagttaatcttgatgttccatccatagaggtgcatagccataacttaccctcatatattcccggttataatggtttcttcatgacggtcgaatattgcgacgggttagtggtttatgctaccgagaacgggattgggatatgcaacccattgttgagacagattagatggatcaaatccaaagtgaattatcgttacaatggggtgggatacgacaattctagacccgaaaatcattacaagatctttgagtcttgcccctatagcgatacaaccgtgaaagctagtatcaccgagtttgtatccgatgcatggatttcgaaaccgtacgagtttgcatatgattgggattttatgtcgtcctatagtgtatcattgaatggagctttgtattgggttgctttccatatggcgtctgatgaccagtttattcaaagctttgatttttctacggagaaatttgaaccctattgtctcttgcctaataaaaaatgtgatccaagcaatgctaggtcccttgcagtttttaggggagatcgattttcgtatttagagcaaaactatgagacaaggaatatagagatttgggtaacaaaaaaagagattaaaattgagaatggaaaggctgtggagtggatgaacttgatgaaagtgtcagttcctaaatggtcgagtttaagagtaataagctatgatccgccaagttacttcatcgacgataaaaccctcagtctcgcatttgtgttgtttgaacaagaaggaaaaggcttgcatttatattgccaagggagataagttccatgaaattataataaacgatttggttgagtatcctactcgtcatcaccgtacctatgttcctagtttggtcccagttccaacgttcacgatgagcaatagaagtaaaacgcagcaggttgagtcccgcttcacaccccctagaggaatacaagcgagcgatggaggaaacgagtgggacgacggcatcttccacaatgtgaagaaaataaatgtaggagtaaatgattttgacacggtctttgtcaagtttcactactccaaatataaccggattgaagccggagcaggtcatggaaatgcgacaacacataatccagacgacgaagtacgtgacgtgatgagatttcttacttcttaatttattagtttctaacttatatatagttttatcatacatatcatatggatttcttgcatagattatgatcgctggaggcgactacattgaagccgtcgaggggacctacactgaaagccatatcacctccattacatttcggatgcgcaagggagacatgatgccacagtacggacgcttgaacgggacgcccttctcgcttcgaggagaacgaggctccaaggccatcgggttttacggaagaagctctggtgtccacctcactgctctcggcgtccacttctctccaccccctctatattattcgtttcctaaccattcaccagtttttaattattaataatcatgccaataaaaagtaataattcttttttggatatgaatatgatcgtttttcttgaacatgcacgattgagtaaaatgggaatattactggccgtgttttttattgggttcgcaaaagcctaataaaaaaagttggacttatgagtaaaatgggaaatagggttttccaatccttctttctgaaaccctaaaccgacaaggcaagcaaacaacaacgctgctatacaaatccatctataaactcttttttttcttttcgaccgtgtccattaaaaatatatgatgcaaccagagaaccagccgtgggaattggaggaagagatactttctcaccttccaacaatttttctcgctcgattgaaatcagtttgcaaaccaactagtgtttaactattgctcatactcagcaaaccatgcacctactccaatatttcaaacttctgatctctcctttaatgcaacatatgtaataaacaacaaaatatacatggaatgtctcggaaaaacacaaatctatagggtattttctgtaataagtaaaaatataaggaaaatatgtaaataaaccaaactacaaggaatatatgtaataatatgaaaaagtaaaaaacaaaaaatcctttctctctcgcttctcttcttctctgcccctccttaacactcttctcgccgccgttcctctctctgcctcttgagcctccggagctggtgaaaaaaatcgtcttttctatctcctttgaaggtaattcagcttttcgatttctccagatgctcatatagttgttttatgccagtcgaatcggattattttcatgaaattaagagtgtttagggtttgaatctccgtgtttgtagatggcgagcaatattatcatgttcgaggatatcttcgtggtcgataagctagaccctgatggcaaaaagttcgataaaggtatctacttttttttttaacctcagtcacgatttgtaatgcttgtcatggcttaaatcgagtttctgatatgaatcctagtttcttgtgtttgttttaagttttagataaattggaatccaagttagtgtgaaaaagatctcaacttttaaaattttaagcctcctaaagtttgtttgttctgacttcaaattgattgcgtctctgtgtgtttgtggtaacacagttacgcgtgttgaagcaaggagccacaacttggaaatgtttatgcatttagatgttaacactgaggtttatccattggctgttggtgataagttcacgctggctatggctcccacgcttaatctcgatggaactcctgataccggatactttactccggtactgcatgctttttctatgttagatttttggtgtatattgcatactcttttttacttgcttggataaatctcatgaatggttacagtaagttaggccagttaacttttcttaaggttttggttggggcataccattaagtgctaattgctcgatatgactaattccactggcttgattcaggagataggaataagactaatcatatgaaaacttgagcaatacttagtctcttgaatattgaattaaaacctatctttgaaaaccaagactgttttctttgataatttgaacattcatttagtttccatgtcgctctattacaagaacatgtattaggatttgatctaattgcttaatagaacaattgctttggcttgattcaggaagcctatctaggaataagagtaaacatgtggaatttgagcaagacttagtgtcttgactcttgaatcatgaaaccaagattgttgttagctaatctaatctagtttccatctcgctttgttacagggagcaaagaaaacacttgcagataagtatgaatacatcatgcacgggaagctttacaagatctctgagcgtgacggcaaaactccaaaagcgtaagaatcccatatacctagaccaacaaaatcattttttcccaaagagatccaatttaacttacagatctaaccatcatgcttcggtttctatcttgcaattatgtgtttgcagagagttatatgtttcgttcggggggctcctgatgttgcttcagggagatccagctcatatttctcacttcgaacttgaccagaggctctttctactcatgaggaagctttgagatgccattgtctaatcactttccgagaatattcgcataaaaaccgaattaacagagagctttcttataaaagctttatcttatgttaaactttgctattataaatactattttcatgaagcaactcttgtacatccaatatttaactgtccaattgaattatgcttgtagctcagagctgttgatgaatgatgataaccacttgaggccaataagttataaaacaaacagagacaaaaaaattgtttcttttctaacaacactctcacatgtgtttagtaatattctctctttgaacaataacactaagccaataaaacaaaaaagtcagtttctggcgtagcaggaatttttctttgtgatagtgaagtttttggagttgttgttactcatgcttgtatccagacgccttcccacttctcccaactgtatgaggctcatgcgtattatcgctgtttacctccaaaccatgataagcatggctgaggaaatactcggatcctgattttgcagctgtttgatttagtgagtgagttatgattattgcctctcaactgcaatgctttctctgcagcttatactaatgccattggctctcatgtgtccgtcttcttctccattctttgcttgatctgcatcaagtagattgtcaaactcatggaatcaaaaatggctttggttgacttaacaatgtatcaagctttctatgataccgtttgttttgtgatcttctaggtaaccaccctgaaagaagaagatccgtggctcctctgatccgctatatatgtgcttctgaaaagtggttagcaatttgtgaattgtgatcacttgcggcatttaggttcatattgggtgtacgattttggattataaagaaaatcatcaaaacgttcgtagaacacaattcacaaatttattgatttaaactagaacgatacacgtaactgattcttctttttgcatgtccaaaattatcatcaagaccggactaatcatcataggatacatgtgaaagttgcagcctcttacattttctccgtaactattttgctgtcctgcttttatccctacattttctgagagaaagtcttctgtcagtgctagatttcatacttattccatgactaaagttactttacttcatttcataatcaaataatatactttctatttaaattattatataatttgttgacaaaaaaaatataggtatctaagaagtaaaaagtatatttttcatatatattaaattaaattaaacatgttctaaaaagggataatattttttatttatttatctaacttttggtataattatttattttctgatacaaatctactcactcacatccagattatatgtattttctctttctaattgcctcatatctacagtcattcatttttttataggttttctttcctaattacaatcatttatggacaaaagttaaaaaaataaaaataaaattttcttttctcttcattttcccatctattaatatatatagttattatattcttcatgtagtaatagtagcagtatctgtaagcattgaatttctgttatacacatccatctatatattatcttgttctgatatattatcataaagctaaaaaaaaggtatgatgcaaccagatcatgacctgccgtatgatttggagggagagatactctctcaccttccaatacaaattctcgctcgatttagatgtgtttgcaagagatggaacactcttttcaaggaaaggaggttcttcaacagtgatttgggtctcgcccgtccacaattcatcttgcttgccgaatccaagatttgctcggtggacgttaatcttgacggcccatctatagaggtgcataacttgccctcagatattcccggttataaactttatatgcccatgcacgtcgaatattgcgacgggttatttctttatgcaacctgttatgggattgggatttgcaacccatggctgagacagattagatggttcaaatccagttatgaaggttatgatttcagtgggatgggatacgacaatagtagacaggacaagcactacaagatcttagggtcttactgtacaaatacaaccatgaatgctagtgtcaccgagttgggatccgatgcatggaaatcttacgaatttgcattccatagttggaatttatctatgtcgccttatagtgtttcattgaatggaaatttgtattgggttgcttataatcatgagtctcgtgattattttattcaaagcttcgacttttctacggtgagcttcaaacactattgtatcttgcctactaaaaacgggcatcgtcaatgcgatggtagatcacttgcgatatttagggaagatcgattttcgtttttagagcaagagatctataacacaaggaatatagagatttgggtgacaaaagaaactattaaaaatggggatggagaagctgtagagtgggtgaatttgatgagtgtgttagttcccgaatggtcgagtttaagtgtcaactattacccgccaagttacttcgtcgatgaagataaagttggtttgactcttgtaatatgttgttataacaaggagggaaaagcttatatttatattgccaagggagataagttccatgaaattgaaataaaagatttggttgagtataatcctcgtcaccgtacctattttcccaatttgatccaagttcctacgtttacgatgagcggtaggagtataacccaacatcaggttgaatctcgcttcgcacccctcaggggaatacaagtgagcgttggagttggaggagacgagtgggacgatggtttcttcgacaatgtaaaggaaataattatacatacaaattctttaggcatcatctttgtcaagttttactaccgcaacggtaacgtacgtgtagccggagccgctcatggggattccaccgagactcgcggggtgaaatttcttttgttttatttattttctaccttaacattttcatatatacaactatatactttatggctttttatacagcttatggttcccgacgacgactacattgaagccgtccaagggacctacactgagagtcacatcacctccatggcgttccggttgcacaagggcaaccggtcgctacggtttggattcttcgagggaatgtcctttgtgcttggaggagcacgaggctcaaagatcatcggattttacggaagaagctctgatctctacctcaccgctttcggcgtgcacttctccccccttccctagatttttcatttccaagatgaataatgatgtgtaagatgggagcctagtaattcatttactctattttttgtttaatatctttactaaataaaatttgatgtctcaagctaaatgttactagtcaatctatcagattttgttgaaagtaaaactaattcgcatgaaagtaggataataatcaactgatcaaagttttggaaaaattagatatacaaataactaatagaaagtaaacacaatttaaacaaatatgaaaacctaatatatatttaatcatatgtgataaagtttaactggaaacaaaatagtagaaaaatagaaaaaaatcaaattgtcaatgtttaaacctctttttgtatgggtgatatgatgttgttttctatttcgtcattcatatctagtatattcttattgtggtctttttctgtatcatttatttgatgtgcatttcctctaaaacttcatttagtaccaagcaaattttcaggtttctacatgctaattagcacacttgtgctttatttcgctccgttataagctgaacttttactatattatgtataatatggttcacatactcttgtttgtttgtttggtctttttactccggtaaggaataagactagacatatgaaacttgaccaaggcttagtgtcttgaatcttggaataaaacctatctatgaaaaacaagattgtttgtttgataatctgaacacgcacttcatctgatttagtttacatctctctctatcacaggtggcaatgaaaaatgatgatcgatgaagtcggttgagccttatgcgactaattaaattgtagaaccaacatttgatgattctgttatgtagaagaaccaacatttgtttcatttgatttagaattaagttctgtcgtgtgaagttgattctgagtatcttcccatgatactctctttcgatgttctccgatatctctttattaaagccatcatgatacacattcagatggtttctcgtatacgtttagttcaattttttactttctcattaatgcatatatatatatatatatctactggaaaattttggttaaagttgtgtgagcattggcgaaaatcctcccactaaatgatgaaaaaagtttccaacttgctatgttgttcttgtaatcttcttactattttttcagttcttttttttcttcataattgtgtttttaaattgggaaaatttcctaattgttaatggtcctccaaattatgtgtcaaataaaatttgtagaaataccaaaataaacacaagagattaagcatgatatacccttgatcttaaagtgcgattccacttaaaaatcaaactcggatcgctaaaatagtcaaaagtatctagtaatcaaagactaagaaatgactggcttcgaatatgagtggataattattaatgtctgtcttatccatatataaatcttgttttatattattttcaaagtttcaactcaggagtatttcgtaggaacatatctagtaagaacattaatgtacacttaattttaaccactctcttgcatcacaagtaaaataaaaataaaaatatatgggttaattaacatgaaacattaaaaaaaaaaaaaaaaaaaacatgaaaggccaatagaattaaagacagcggtttttttcccaccgattttcgtattagatttctagtggaaagtgttagaatataggaaatatggaatatttccttattcctgattatgacaaatatgtaaacaatatacttgtagagcactcgtgttatgcctatataaggcttatgttaatatcataaatctccatggagattcataatattacagaaagatgaggagtcaagacggttttgtcgtgtgtgtgtttttcttttgttaatctatataaggaaaacgtgtgcgttgatcttacaaatataataaagttaatctatacaaggaaaacgtgttagaaagttgcataaaagtatttaatcgtataaatgaaaatggtctcattcttaataaaaagattttaacaagaaaaaaaccaaacgagtcaagacgaaagtaaaacgaattgacaatggaacctattattcgttgtgtcttaatcgtggcttagttgtatcatgtatggtacatacgttgatacacgaagtaggtagtgagtcgtggttttttctcttctgtatttacattccactcactttctttcttgcatcatccttacacaactacttcctataaatagaaagagactactaagaactttacatctgaagtatggaattaatttagcaactaaaaaaattcaagagagcaaaaagaactatatataccccctcctacctcatgaagtatcatcgctctcattctctcaagcatcatcacatatacagcttgaattagagctaagaaactgaaaggtcacgaatactcactttctctacttttagtttctctcttcatattaatcttctttctatgttactggtacttattcgtcgtctctgtagattaaatacattatacttttagtttcgctctacatagtccccctacccaattcatcattctcaagtatctatcgtcacacataccttgaaaactcaaaagtctcacgaaatatagttttctcttcttttactttagaccgtcatttctttaaatctatagtagtctgtaatctacatatattgtatatatatatatatatatatatatatatatatttaattggttatatataagtatattttaattaactaaagacaaatacgtagttgatcattactaatttactatgattgcgccgtaactgagtttgtgtttgaatctttcaggaaataatggcatttcgtatgagccgagatcatgcggactttgttgctcatggtggaaccgagtgggatgatggggccttcgtgaacgttaagaagataaaaatatttcacgattgggctggtatcaccttggttcagtttgactatatcgacggcacgggggctattgtaagcggtctcgatcacgggacagaaccttttcaatttgatagagaacacgggagggttccagtcgagggtgctcgagcagaggttaattaccaaactaatatttttttaattcttttttattgtttctattccaaaacattaatgattttatttgttttccccattttgtttggtagttttggctgagagacgatgaatacatcacaatcgtcacagcattcggcggatattgtgtgaggaagattgagttcatcacaaacaagcgaacctttgacttcggtggttttaattgaccaccttaaatgttttctttaaagatatcttccataggattataattagttcttacaaagttaaggtcagattataatttgcatctcaattaatatttaatacatatgcagtaatttttttgactaatgttaaaatgacatttataattatttttatctcatgaaagaaagataaagataataaaatatctaatacctaattttaatataagatgaaataaaaaaaataacatttgaacacaaaacagagtctaagaaaaagatgataaaacgtgtttgttttttttacaaaggaaaggaaagaatcataattaaagtgagacatccttagacgattctttgctatgctcttcgacttcactcactttgctcttcgacttcactcactttgttcttcttcatctaaagaggtcatctaccgagcttagacaaagacgtacctcttctgatgagaccttaccatgctctgcgacaagaacattgtaatctcttcctttcagataagagagagtcttgacaaacaagttgaaacaacttttttaaaatttaagaccttttgaaaaggttttaattaaccttaaactttaaagatatcttccataaacttataattgattcttacaaagttaaggctagatctactttgcatctcaattaatacgtttgtaacatttaacaacttaataaggaaggaaatggtatgagagagagggagagagaaaaaggatataatggacggcaaacattttgtgtgtgtgcaaacattttctcttctaacaatctcataggaagccagtaaaacagtgtctgacatagcacaaatctttctttgtgatcaaactcaacttcttggagttgctactcgtgcttgtatccagacgccttcccgcttctcccaactatataaggctccggcaaagtattctcactatttatctccaaaccgcgataaactcggttaaggaaatactcaggtcctgattttgcagcggtttgtttagtcaatgagttatgatcattgcctcgcaactgcaatgctttctctgcagcttgtaccaatgtcattgtctctcctgtgtcttcttctccattcttagcttgatctgcatcaagtagcacactgtttgtcaaactcatggaattaacaaaataaaaggctattgttgactgaacaatgtatccagctttctatgataccatttgttttgtgatcttctacgtaaccaccctgaaagaaggagaaccgtggctcctctgatccgatatgtgcttctgattctgattttacagagttgatcacatcttggaaatgcattaggtatgcacctgtccattcactccctctgcagaaacaggaacaccagacacaccgactcaggaacctcgtggatcgaatacaaaaactattaacgattttcgcattataataatttctctctgtacctgctaaaagcaagattggcttcgaacggagtaatgacaggggacatgaactctttgctatctaaaagagccgtttgggcacatgagatgtagatgaaaacatcgcactaagagaaaaacacaagacagaaaaagacattactcacttgacatatctcactttgataattacagctaattggaaggctctgttgtttaacttacctcggggaagtttgcgagtttggccgggttaggccgtcccatggcaagaatgtaagattttttgccagctgcagatatgagtgcttgcatatggtgaatcatatgaaggtaaccagctgcatatattgccaggtgacattagacatttaatgaacttatcaatcttgacatcacaaaatcaatcttgacaacacaaatgcagaagaataggaacttaccaacaccaagagtccccaccaaaatacctataatattcgcatccttagctttttccaccaagtaatatctgcaacacataactctgaatgaggacttgaaatgtaattcaacagagataataaagaagatcgaaatgattgacaaagtttcatattgtgatgtataatgtctgcttgaaaaaagtgattataccgtcgcttaagtatccttctttgttgataaaattccgtcaccaaagaatcttcttcagcatcatatctgactaacatcaacaaacgaacataaacaagaagataagctactcatgccttagtcaacccattggatatttgtttaagaaaaatggatcaagaaatttccatggatagagccatatacctatgtcacaaccattgaaggtcagtactacattggcaaaagctgaactgtcagaacctatccagaaaagtaaatagtcctcgattttgcttccttctggcaagtcccaagttagccctcctagtctatagctcctagatgaggataagctatcactagaatcactttcgctatatggtctcggatgctccatggattctctaggatctttggatggactaatgaatgaacacaagacattggctacagataattgagaatcagtcttcgataatcctaattcttctcggatttgtggaattacatgcgcgtattctagaccataaagaatctgaaaacaaagcaaagattgagaaaacagaacatgttcatcaatacctataccataaagataaacttatgaaaacaaagcaaagatagagcgataagcctcacataccatgataggcttatcgctctttgacgcataatctatcaaatgcttaacacagctggagacgtttatcgaagctttcccaaaaacgaagaatgctggaagaactgatgtcctgtgaaaacatagaacctcacaataagacattgtttcaacaagggaatttaaagcaattacatagatgaagaaaagggtttatgactcacgggcttagacatgtttgaccgtaatgaacaacacattcagaatcaatatgcaaagctccaacttcatcaatacagcaactaccataagttgtgtcagccattacaaagaacctgacttctctgtcagtaagcaaacgagttttgctcttaagagcactcacgaccttagtcgaatcttttaacaactcatccgggaactatgaaagaaaaaaactaagctttatcatcaaatattcattgaagtaacaatttgaagctaagaaacaaaatcaaacttcttcattcagaaactggagaaaaggtttggtacctgtaaagcaattctggtgaagcttttgctaataatgaactccgccgtacggttaatctcgtactttgattcaaattccaactccatagattaatcacacgaaattatcaacctttccggccgaataactaaaatcgtcgtattcgtcgacttggatttgcggctgaagaaaaacaaaccagacgtagaagaatgatgcttgatgaaacggcgtcgtttctaagtatagttctcatcactggttttccttatttatcaaaccggtttaagatcctaccaaaaaaaatcaaaactcaaaccggtttttaagtatttattttagcggttatgatgaaacgacatcgtgttgattccttaaaagtgcctgaaacatgaagtgagctcagagtgattcaactgatggatttacagaagataacaaagacgagagaagctccaaaaaccctaagagccatttttcacagttacaacttacaacgcaatgaaagctgaatcaacgaagttactttcagaaaaaataacaacagtgtcccttttttttgaattgaatttaagggaagattcgagcttgagttaacgccagaaatccgatcagtggcaaactacaacagtttcatctaaatcaatcaaactataaccaagtcgaagctcaaaagaacaaacactatgagcgcttgtaagaagcagaggataaaccatagagaagagagatcagatgaaatccacatcgcaaagcttgcaattaacgatgacgttcgacaaagaaattttaaaaaaattaacctttttagtttccgattgcattcaaggatctgggttttgtcgcgacgtcgcacagagaacgatggacgtcgagcactatgtttccgtattgattaaaaccggttcaagtatatatttatcggtctatatttgcaaataaatcacacccacaccggccatcgctggtttccttatttattaaacctggttttcatcggataagacgaaacgacatcgttttaatccaccgccgtcaaaaacaatttcttcggtcaattatacctctaagcttcgaagctccgacttcttcggtctgtttcttattaaacacacaaacaagaaaacgcaaaactaatcctctctcgaattagggtttcgtcaaggtattacattatttcacacccttatcatcatcttctgatttctggtaatcttcttttgattagatcttcctatcgattggttcagtcctttcttattttcgaattcttgattggtttaccgtggttgctacgatttaaacctttaacatacctaaaagaacgtttttgtttttgctttttgttgttattgaagtttttttttttttttattgttgttgatgaagatcctggagttgatgtattgagagaagccattgagataagagatgagctctacgcaggctaatctatgcagaccatccttgttctgtgcaaggacaacgcaaacaagacatgtctctagtgcaccttttatgtcgtcattacgctttgattatcgaccactccccaaattagctattcgggcatctgcatcatcatcgatgtcttctcagttttcgcctctacagaatcatcgctgccggaatcagaggcaaggtcctgttgtgtgtttacttggtgggaaggataagtctaacggtagtaatgaggtgagatgcttcgtcttcattctaagatgtctttgcttattagatcatataaagatgatgcttaatctttaaatgttccaaattgatctttttgtgtgtgtgtgcgtgtaagaagttcggcacagagttgagttatgtttctgattataagtagtattgatatgattcttttctgttttatacttacttggtcgaaaggataaatctgatagtagttatgagatcagatgatttctcttcattctatagatgttcttgctgagatttgaatattaaatcttgcaaaagtgatctttttgtctgtgtttgtaagttaaggcacagaactttagtgcgtctgatattaatacgctcagtgatgatgttttatcatcagctatcatcaacatgggaagctattgagaaagcaatggggaagaaatcagttgaagatatgttgcgtgagcagatacaaaagaaagacactggcggcattcctccacgaggacgaggaggagggggtggcggtagaaatggtgggaataatgggtctggaggctcatcaggggaagatggtggtcttgctagttttggggatgaaactctgcaagtggtattagcaaccttaggcttcatctttctggtaaggacaagatcacaagcccgcacaagttatctttgaattatagtatctttagctttgatcattgtttcttttttttgcagtacttctacatcatcaatggggaggagttgttccgtcttgcaagagattacattaggtaccttataggaagacccaagagtgttaggctgacccgagttatggaaggttggagtagattcttcgagaagatgtcgaggaaaaaagtgtataacgagtactggctaaagattaagcgatcatcaacaagtctacctggtctggtaacccgggcaaatacaaacgcatcttgagatcttatgttgattcaaatgaaatgaagatagtgatcggttttcttactggtttaagtagtttcccttagacccttacccgtgtttttgtttttgtttaagttacttttgccagtagtaaatattgatgctcatcgtcacaagtattgactctgtcgtgtttacgtaaatgaaaagttaccctgaatggctgaatcatattatatagaaaaagtaatcgaaatcgataacaagagcagagcatgtaaagaagaataccgaggagatgacataaggtgttagttagggaaccggaatgagagtttggaagtaagaagaagcaacaacacgagcgtatgcagacttgtctatatcaccaaggctactggaggatgagtgtgacttaagatacgacaatgcaacttctagcatcacttccacttctttaaagaaagtgtcaaaaacaaatgcatcagacaaaccgaaaaatgacggccttttagtttatcgattgaactaagggcaccaaactaacctcgtcaattgcccctgctttaatcttcgattgcatcaaacaccatttcttgaaatgtacacctattgaggaagccaaagagatcattccacactatgtgctttgcaaaatttcacacggaaaagtagaaatcattactttggtttacttaccgactcttatatctataacagatgaaattatctgggaggagatcaaatatcgtttgcagaggccctggcttttgatgtacaatggttgggccttactgagccaatgacccctagatatcttttcagagacctacctcatgattccagctctgcgtcttcctttgaaagtcaaactacttttgtggtaatagcagccagtagtaaatgtaaaccaaggccaaatagacaaacttttttcgtaacttttttgtattgatattaaaaatattctgagatattacagactccagaaacatttcccgtatctcgagtccgacttaacacatatagtaacacctttacttaaactaactggtaaaatggatctttaaaagtgttccactggttttcccactgcagctttgcgaccatctgctcaaataaaaggatccattttaggatctacacaaattaaataattaactggtgtagatcctatatagtttgagcatatactttgaatcttaacaaattgtttcagatccaatttgtaaaagcttgcaagagcacatatccacttagaaatcgacaagcatctatgtatctacatcacataaagcatttgttggaaacatttacaccaccaaagagtgttccaacaaataatgtcctacgactaacctcaaacaacgttttttttgcttgaacaatgctgaattttctgcagtagattctggttttctcgcagatcttcacgcgaaaatcaaacatccttcgatactaaacttcaacatttgaaactagtagcatctcttctggtactctgacgagggagcagacactatgggaatgtaagggcagttccaacctcccagacatattttaataccaaatgaactaagattagaaagggtaagagatgcgtgtacataccagttattactataatagttagtttttataatttcaaaactaaagaatgtaaaaaataagttaaattttttaaaatataaaaatttaaattaaaaccagaaaaatcttattaagaacaattaagtaaaggaacttttttttgtcttatcaattaaaaaatattaacttcttattttcatagaaaaaaaattattacaattaaacccaatacacatgactatatgagttttataagaaagtaatatgaaaaacaattgagtatataactttttagtctaacttttgcacggtaatttttaaattcaaaatcaaaattttaataaatatttaatcaaataaaaattaatatttttaattgataatataagaaacaaactaactattgattaaaaatatttagtaaattaaaaaaattaacttcttaagaaactaactattaatattatgaatagttcatatcttaaaattgtttattctttgcacacaaaaaaaaatgtttattctcttaatttagttttgaaattgaaaaaagctaactattataataattatctagacgaaaaaattgtttaaaaacaatacagtttttagattttctatgcaatattattaattactattgataaactgtaaacttgaagaaaaaataattgactatcattggtttagaattgtagaaaaactgtaaatcacaaaagcatcatatacatttataattaacttttaatatattttttgtatatgtgtgaaaactctaaaagatcgattatttacacaaagagtaaatttaaacataaataaaactgaataattaatattaccccacatgtttataaaaacaataataataaaatactacatcacaagattgttttgtatgtagactctaaaacaaaataaaaattaatttaaaaatattcgggttacgccaggtatattttttaaattttatcaattaaaatataatttaataaatataaaatttatggtttaacataaaaattatttgaaataattaatatgaacttgaattagggttttattttttgagtgacgttaattattaaagaaagaaacaggaatatcataaaaatagtttctagtaacctttaaaaaacgttgtaattcagaaaaacgtgaaaccaaacgggctacaaaatatattaaaacacagagtacaacaggcttttggtttgagcccaaacaagcccatttaaatctatttagtctgtaacataagtcacgtgcacctatcacgtgatcatcttctttcttccttttttcttgtcatctgttacacatcggttagggttttagtttctcttaccgagattcaaatggcgcttagaggagtttggcagctcaagaaactcgttgtgagctactgtaattggggtggtagcagtagaggcatcaggtaattttgtttacctataatttgatttcgcaatctatgagccgtattttttcatttatcatcgatctaccatttttcctgtaattcactttggaacttgagactatctatacgaatctatgagtctgtacttggtatttgtgaagcaaattaacttttcatgtcaatgtgggtttagaaatgtgaagcaaaatgatttagtaatgaatcgttaccatttcatcctagtttggtactacgcattttcttatgatgtgttgttaaacatacagagcctttatggaatcagaattgcctgctctaaaggagaaaaacccgcagctcgaagtaattaccgagctttcacggggacaacatccttatttgaagggcatttacagtatgtatatttctcctctattgaatacaatcctgattcaacggttgttgatattagcaatttcacttgcacaattcatagggaatagaaatgaaagggtagtgtgtgtgaagaacatggatcctgaagaagtgcttttgaatgcaacgaggctgaggaactcgcttggacggaaagtggttaaactgaggaccagacatgtcaccaaacaccccagtgttcaaggcacctggacaactgctgtcaaattctgagactttcctgctaaattgtttgcaggttttcatcttctagctgttaaatcgaatgttgcaagtatcaggattggtcgtttatctgtattgcaaccccaagttgtttgtaccgtctgtgacttgggacaaagatgtagtcttcaaatgttttgcagtttttgcaatgtttgaattttgtcttgtccttctggttgagtctataataagattacacaagggtttaaggttatattctttgtttgctctcagaattggaattgtcacttactttgtatttgccaatacaaatagagttgtgagagaacccaaacttttcctttgttattgtcacaagtaccagaaatcagacaagcctctgtaaatatccattcataattactgttaccacatatacactttaacatgtaaaagaagaagaaaaatgatggtggatgatcttaattagctggctggagaatgaaactttgagaagctttttgattttggtaaattaggttttagctgatgttttctggtgttggagatgatagagcagacttgtctatatcaccatggctacttgaggaagagtgtgacttgagatacgacaatgccacttctagcatcacttccacttctttcttgtactgtgtaaagaaagtgtcaaaaacaaatgcatcagacaaaccgaaaatggcggccttttagtttatcgattgaaactaacctcgtcaattgcccctgctttaatcttcgattgcatcaaacaccatttcttgaaatgtacacctattgaggaagccaaagagattccacacaacgtgctttgcaaaatttcacacggaaaagtagaaatcattactttggtttacttaccgactcttatatctataacagatgaagtctcgtctttagcttccaagcgccatcgacagtggacctggtatacaaacagaatttataaagcatgccaaggtaaaatttgattggtgggttgcaaaaagaatcatgaaacaagaaccacattttcctcataggtaacatacctcaaagtaagaaccaaaaggaacatcatgtggctgttgcactgtttcaaaaacctgaaagacgggaagacaagtattatcagacagataattcttatttcattttgcctaaacaacattagcaactactatatcccacggaaaagaaattgcaataaatcattcctaccagcactttcttatctggtgatagaacaacatgctgccattccgtcacagcagtgtctggtggacacatcggactattacaaatggatctaaacttaatctctctaacttgaccatcatattcttcagcagtatgccacggctcaatctaaaagataacaaacagacaataatgaggttcctgagaagtcgagtcgcaagaatgcagctttaaagcatgtaagcaattcagtggaaaccacaacaagaagagcacatatgtatgaagactaatgatctagataccaatgccaaacttacattaagatttttatccttccgtgcagatctgtactcattagtataagtggaatcatcagccaacaagacgttcaggacttgctcaggtgtactggcaaaaacatcctgcatacaagagtatgatgcaaaaatttcagaacaatatcttcgaagaactatagcactaacaagacaaaccgaatgtttacattgtagatgttaacaaggacttcttctttgatgaaagcctgaaactttacaggtacagctgcagtatcttcaggagctttcacttgtactttaccacctcctttcacagagctactatgagcacgcaaagcagactgtgctctctcctatatggtaagaaagtaacccaacagatgtaacatgttaagacttcaggcaacaacatcaaaattaacttattgattaaccagcaaatattgaatacagcatgcagtggaggactaacatataaacgtaaaaatttattaataaaaaatggagacagaccttcttttcgacttctaacattgcatgataattattcaccgcacgttgcaatgcttttagtgtatggttcctgttccaaaatgatgcaaatttatacctcactctacctgaaataaagaaggaattccacagagacataaacataacaaagcaccactacatatgaaaaactccataaggttgggtcctacagacaaatggctatgccaggaatcaaatgcaagaatgtcttgctgacttgtgccggtaaaacagtaactagcaaaaagtgtttgatgaagaaaaagaaaggtatgaacattgatatgatcacaaatatccaataacaaacattattactaaccatcaggagtcccaagagggggaacaccatgtccaccagcacccatccgtagtatgattgttatagctgggtttatcaacgcgtgttgacttctacgaatctataatatacaataaaagttatgtatccttagtccgcttatcagtttaaatcaacagaaatccgagagatcaagaaaagagtactacctcatctatatctccgagagggacaacaacctacaaaatatgatgaggaagtttttagcattggttcaaagaactcaatatgtagttacttatagaagccctgaccttcatttgcttagagaaaacattggagtggaaacatatgtgccacgcggaaacatacattcggccatgatacaggaatgacctctccagggcacatgaataactgtgctcgacaacctaaggaaaacatacatcgaaggcatacatttttgaactttcatatatactacaatgagattttgtactagttaagttacctcatccgggaggagatcaaatatcgtctgcagaggccctggcttttgatgtacaattgttgggccttgctgatccaatgtgacccttcttctaccggctccagcatatccagttacagccctacccatcaaatccattttgtacaaagttttaaatcacaaaggctactagatatcaagtcagaggtgtggttccattgaaagtgaaaaaccagccaattagcactctcctatctaaacaagataaacccacagcttatagaaagattgaagtagcactggcggattacctaggagcattcacgggtagtttgattgcattaatgttaaggcaaacctgacaaacaaaattagattagcttctaaagagaaaataaggattcgaataaaaccattcaagagaaaaatatacaaacggaaactaaggaaaaacacacctgcccagacgggctgtctaatgagtgccacactggacccgtttggccttcacgttcaacattaatagttactgagccaagaacagtacttttccaaatgatatcccaatcatgaattgttacattaatctgccataacaaatataatagtaaatgttagaaataggtatctggtaaacataacaggtgcatgttttcaaagttactgaatctatatgtctattttgaagaataagtgtttttcatatttctttaccaagtcatatataagcgaaattctcatactaggagatatcaagtgtttgaacttagtgataaaccctctgcctcatattcccatgagagtctaaacaactttaaggtgaaataagtttcctaaagcagtaaatgatatttaaccttagcaggaagttcatctgtgggaaaattgaactcttcaccccacattggatttctcgagccagggaccatagaactgtaacaagcacagagctactacattaacattagaccatcaaatgtgtaagcactcaacaaccaaaccaccaattatatgttttcactttttttagatggatagaggttgttgttggtaagaagctaaaagacagcggaaaagagcaggaaagaaacatgacatcgaaaaagttgctcacatgttcctttgaaaagttataacactaattgaaaaggatatgtaacaacctgaatcgcttttctgatccacaattaacaatagcataaggatctgatgttccatttaagttagcaccaattagattcttagcagccaagagttccacctggaagaagatcctcacattgatgcaatgttagtatcctatctatgcacagatgaatcataagaatcaggagaagcatttaccttgactatataagcagcattagtttgagtgtctcctctcaagtgtcctatctacaaaaataagtgcagaaactgcaagtcaaaaaatttggaaaattacccaattagagaaggggaaagctaaaattcattaagaacccacgagatttctccggctaagtaaactgagaaaccgatcaatttagagaaatgaagaagatgatataaaaaccttgtctttgtcaaaggcgtcaccggaatcgagattctgcatgagacgagaccgatcaaatccaacaccgacgacatcgtcatctccgcctcctctgtaagcgaatagccaataggaagcgattaaaaacacagaagcgaccaccgcgacctcaatctcccacgccgacggtaatagaacttccaccgctgactgtaccatctcgatcaacggagttaaaaagtttaaatttttcgaaacgaaaagcgcgatcaagaggattgtctagggatttatcctatggaggatcacaacacagagaatcaacattattctggagagaagaaacttcgccttctttagaagaagaacaagtgagtcaaaaaaggacaatcgctgagaaagaaaggattttggaaagaaaagtagaaactgagaaattagttgtaaggacggagttacggaaatacccttggaactgtaaacagttactggctgtgggactcgaggactgtgaggagaattcgagggtagttctggtaattaagaaacttcgaacgtaaatagtaaccgtagaaaagtcgtacgaagactttttataaactgaaaaatgaaaaatcttgtcgtgatgtatattaaccaaattttcttactggttgaataaaaagggaggccaaaaacaaaaatcgaactagtcaaattgaaccaaaccacactaattacgttaagtttggtttaaaatttcaataaaaactggtatatgactcaaatccgtgaatcaaattagagtttcttacttttctattgactcaatggtttttatttgttttacttagaacaaatttgtaaaactatattaaaaaacattaaacaaaagaaacaagtgtaaatatataccttagatcatttaattaaaagctctatttatagaaatgtatattcatattattttttttgcatatctaattaacaattaaaaaatccaaggatacaatagatttgatttctaaaacctagtaaaccggataatgatccataataagattaattcagttaatttatcggttcggtcttaataaagtggttttaattgtagaaaaggcgaatggaaagaggccacgtggaaaacaaaggagacagatagagagggaaggacccgttttaggttttttgattgaggtataaatagatttcgatcagtagacgtttttttaagttgcctttacacattctcttttgctcctcctccttctctcttactctcttctcgccgcaaaacctcacttgctctctctttctctctggtatatctcattatctctctatcttctgtgttgttgtatatatgtatagctctaacttcgattctttacgagctcaatttctttgtttagatggttccaaatgttttacctttttactttttttaatacctttttgtctttgttgctgccatgtgagctcaagctctgttcttgttagtgggttaaattcctttcttttatggatattctgattctttgagcataattgttgagaattgaagtcagttttgtctcggttactcaaaagtttcgagctttgtatattgctagtgatagaggcagcttcaaatccgaacaataggaatacttagagtggactttgattgtggtgcccctgagatttactctgtttatttggttgcaaatattgtacctttgcttttacctgccatgtgagctccaactccgttctttgtcgtttgctagcttcccttttttaaatagttttcagattccttgagtataattgttctgaattgaagtagggtttttcttggctgctcaaactttgtagattgctactttgctagtgatagaggcaacttcaaatccgaacaaaaaagatacttagattgtgcttctcctgagattactttaaagattttactttggctatgaacaaaagcctatagctttgtcttttatagtctaatttaagtaatgaaatcccagattcttagttaatttagagaggaaaatgggtagtttgaaaggaaagtgatgagatttcaagaattctactaagattttatattgcttgatgcattctactttcaacctgaatgttagtagcagaggtactgacagtcttttatccgcaggatctttatcggggagcattacccgcgttttaacttacggtttccaatgtgaactaagagtgtgttatcagttgtgatgactgtggctgaaccacacatggagctcaacgaagaaagtaagcaattcgatgttgagaggttatcgccaaagaaagagcaaagtcctggaggagaacataaagaatgtggtcttaccagtgctaatacaagtgaggaaactgttacttcagtttctggtggtgaggaattggatgttgatatagttgaatctgatgaaaacaagacttccaccactgatgaggacccgaacgctactgaatactcaagctcattttccgacactgcatctgagaatgctgaaatgttgcttgatggactaaccggagaagctgaggtcgaatctcattattgggatgaaaccgatctaggtcctgcttatgattcttttagcagcatttttcattttaggtgtgttttctgcctaaatccttctcgtgttctttcttttctactgttcttgctgttctgtaattagttttctcttccgtgtgttttttctaggaagaaaaggctaactaaccactggaggagatttatcaggccactgatgtggcggtccaagtgggttgagttaagaattagagagttagagtctcgggcattagaatatccgaaagagcttgagttatatgatcaagaaaagcttgaagctaatattgatccatctgtgttggaaagttgtggtgaggggataaagtcattgcctttctctaatccgtgttacaaaaaaagagcagcaaagaagagaagaaagcgtaagaaggtcgagagcacagatgatatagcttcatatatggcatgtcacaacctcttttcttatatcggtaagagactaatgtacttgtaacattattaactccataactctgtctttgctttgagcatatcattcatatattgctgcggtttttgttacagagaccaagagattgagctcagatggaatgggattggctgatgactttggtggtatgttcaccaaaactgcaataatttctcatttttttcagactcttaatgtttttggtgtattgatatgttacttgggacagatgcaaaagatccacggagtgattcaaatgaaccggtagacttagatgacgctgactcactttttcatcaccgagatggagatagtgtcttagaagaagttctctggaaaatcgagctggtgcattcacaagttcatagattgaaaacccaagttgatgttgttttgtccaagaacacagcaaggttctcttcctcagagaatctgagccttcttgctgcaagttctgcacctagcccaacggtttctgctggaggaaatggagatgtgatctcctttggagcaatttacaatgcttcacagcatatggcagattatggtcttggtgatatagttttctcatccgaaggagtgatttcgagctatggggatgcgtttcatattcctgacattattgaaagcactgttggtcttttcgcagatgctgatgttacattacatcatcaccaaattggagattcttgtgaagatgtaagttctctttgatactttgagttatgtttcaacgtcttcttccatgttttctgattcaacttactgcagattttggataacatcttgattcgaaatggagtggctgaagaaatgaatggtgatttgatggaaactagttgccatgacgaagccgagaaagcagaggaaggagaaggaaccagtgtcccgccgttgcagcaaactgaagaaacagaagaatataaccaagaagagaaatctttggtactacaaggccgtgaagattcggttcttagatcatgcttagcctctgaaatgcttgttcctaggaacaaaaggacaagaggtggagaacgtaaggcaagttcttggtgcaagaaacatctcagcgatcctgaaagccagtgattgatgaaaaaaactcagtaagcttttgatgatcagagtctttcctctttgaatctcccttaaatcacagctactattttctacttcaatattttgtttctgaacattctcttagatttttctttatttctgcagaatctgtgtgttcacagagaacatttacttcttcttttttttcatatcattttcttctttagcttcttttccgttttatgatgatgaaaagttagagtgaagacacaaactgtgtataataaagctttagattgtagttctatcatcttcttcgtttcactattattaattctatttgatgatgaatatagagaacttatttactgtttcacgagtttttgcgatccaatatttgaataaatgtttggaacttatttattatattttcatgagatgaaaaagtatgaaggtggattctttgtgtagccttggtggcctctatcatgtgcccttggtgggtgataatcaaaaagtccctacctcaagtggaaattcatctgattctgatcatcccaacaaaaaaaaaaaaaaaaattaataatagaaaaagcttcaaatttcagctttactagttgcttgtttaaataattgttgggcattgaataaattagattaatttacaaaaccaacaagaccaatcataatgttgtagcagctttttggaggttcttggttcttgatataacaccacccacgatatcaaaattgagaaccatgattgtttatatactatctatttctcaattatctatgacttgtttgaagcaacttcatggaactcacaaaccttcttgcttgaatttctcacatcattataaccaaaactacaaaaggactttgcaaatatattatttgatggacatgcatatatacatcataatctcaaataaagataatggtttcattatgtgtaaatattagtatatatgtctaagctaataaatgcgctaactatgatgcatgcccataataatcatctttcaaaagaagatggtcccatgaggttaacatgattaatccagcacttaatcccttttttttgttctcatatattctatgtaatctctattgaatgaggatgagcattgagctcaagtaaagcttagctaggcagaactcaattatttcataagaatttattatattacaaagaaaaaatgtttatattatcaagcgacaaaataaataattgatttctatgttaagaacttatggtaattgtttttatgtcacaacttgaattactcctatataaaaacaattaccataactaaacaactaagattaaatgactaaacaattaccataactacacaaaataattgattactggtcattatgtgattttcacttttgtaatctaataactatacaaaatcatatattagacaacaaccattcagcttaagattaaatgaatataacatgtcaaatattgtgaatcaaggctcatatgaattttgatgagagaagactactccataaaggcttccacagaaagtggatcatgaggactatggtaattgcattaaaagcaccaattctcttcactttttctttacaattttttgaatctcttatctcactctcctctctctctctctccacaactacaagactcctatgactgttaaagcaagagagagaagagaaaacagcaactcttaaagaatgaaataaagaggaaaacaaaaaagctagtcaattgtttaactcacactctctcgccctctctctctctctccctctctcaaattctctaaaattggctttgagcagatgaaaagaatctccatcttcttctctatctcttggctatctctctctctaaactattcactcacacagtcattcttcgtcttcttctgtttcatgcaagattcaaaggcctcacctgcaaggtatgcatattaaattcactcctttagtcactgcttactcaattttggatttttgtttttgatgtgttaatacatattgcaaaacaaaaaactcacataattatgtaactgtctggggttttctcttaatagcaaattaaaaaaaaaaataccatatcacattctcaattattactaggaggggtcaaattcttataggtctatctatattattcaatcccatgttttttggaagttttgattccaaaacacatatgcagtcccagttcctttgatcataactaaatatttgaagtacttagaagttaaaagacattaagatagatcaatccagaggcatctttgttatcaatggtgatcaaatagactttgctatttaacccaaaaaaaaaaaaaaaaactgttaacttagtttgggcctattgggcttaatctcaaccgttctgcccaatattatcaattgttcgattctttttcttctttatcgttggttgatcctttaaaacggccataaatattactagatacgtatcgaatacaaaaaggacatgtaccataataaagatgctttggtttaaatgggattcatagatttcagattctttatttatgtataggttttatggatcatataacacaactgtctcaaataattactaatccataattggtaaataaataaaaatcctaaaacaaattaatatttagtttccttgttaaagtcaaaattaatagttttcttgtttcctttgatcctaaacccaaacttggaacctctaatcaccccatttttagaagttgaaagcaaattagctagcttctcccatttcaattctcttacgcgctttaacgaaagtgatgatgatgattcattttatgttaaatttttattagtactcaatcatcatcgatagaaaagagatgtgtgagtgtgacataaaaaaggttatggcaaacagaaaaccttggtaccagagagctatggcggttgccagattcgcaacgaattggagaacaatccctaaatcatcatcacaacaacaaccagagaattttcgtccgtctcgaaaccctagcgtcaacagcaagtcatccaatcataaccaaatttatcaccagctgagaaaatgctcgtctctcaaggtagctgcgaattctttcactagggtttgcctctgcgctccgattggtccatacgacgacgtttttcggattcacgtcccgccgagaagaagttcaagctatcctccgtcgaagcctcttcctatggagacggcagtggcggtggcgacggcgaggatgagtgtggattcagggaggaggatatttagagggaagtcgttgagggaaaacgcgttgatgaggagattcgtggtggcggaagaagaagcgataatggagaatagaaagagagatcaaatggagattgtgaggaagagaaatcagatgaggaggaagaagaagcttggacctagtcctcttagtcgtatggttatcgctgaagatcaagaagtttgtcttctttgaaactttttcatcaagatcagagaaacaaaaaaaaacattggaaagatttttttggttattgtaattgtgcttttatttatttttggattcagagataattaagcaaaatacgcagccgtttaatacctctttgtaaacggtgcccttcttgtttatttagttgttttccggagttttgaatgaaggatggagctaaagagaattaaaatggtttactaattttctttttggtttcgtttaatttgctacgcatacggcatactataccggtgattaaactattcaactgattaactttgttgatagtttagtattcatatctattaatggatgcttaagattgaagactggttggttctgcaatcgttctcttgatgatcagaaataaaataattaagacaattagacaatacactttatcaaaaaaaaaagacaaagacaatatatatatcatctacttccgttgtatgtggaatgttatacatttgattttttttttaaaaaaaattcaatgcatgtaagctagtctttatgatatattgacaattgcatgcatgcatctatatacgtatatacataatgaaagtaagtactatgtattcctcgtaattacataagaaaaaacatatcatgttacatgtttagttatagcttagcttgaaaggtattcaaaagctcggctggctctctgaaatatcatgtgatgttgttatacatactccagcatttcctcatgtcccctgtttataatttgtgtatccagatttctgtaactatataccattaacaaaaatctacaaacagatccgatatttaaaagttataaagatataatactttattcgaaagaaaaaaaaaaagttctaatacttatgttcaataattatatcatgatatcttggagatatagacttcgttgtggttcctttttcccaactagttaagtatattttttttgctaaacttggtaaatattataaaatgaaagttaaggtatgacataagcattacctagagctagggagagtcaccttggtaaaaaagaaaattaaaataaacaaggctacaataaatttacacttgtgaaaaattgctaactaagtaatttaagtgactaaatgtagaagaaaataatcatagttaatagaggacgtgaccatatttctcacgaatgcattcaaatgtacggaatgcactaaacaaaatgatgcttgcatgattacatatttacatctattgtcaggataaatatttgttaattgtatttatttattatatttttaattacgaatgtacaaactttttagtatatgtttcaacaattcaatggttttttgttgttgtttaaatcgtagtacattcaaaagtcaacaataaaatttaaagtgtattattgacgttctgctatattacaattacaaaaccacaccttttctttttgttgaagttatatttgaactcgtcatatggctgctgactgctgaatttttctatttccaccagttaattcatatgtcccatgtatctgtagttgatcgtataaaaagacacacgcacgcgactgaggtggcgtgtcagcagtatatgaagaagaaggaatgttgggaaggagacttgtcagttgtcactttgggttaattgttttattttttcaatcttcttgcttgaattgtattccaagctcatatcatttcattatttttcttacttcctttctaacatccacaccgtgatttctcttctttatattactgataaaactctaaaatatcaattacacttttatatgaaaacatcaatgtcaagctggttgagttttagttttgtaaatatatgtttagtactcatctttgggctaccagataatgacacaacttttcaatcctaattagtataactctattttcaaaaatttaaatagtacttaaaacaattataccccgcttaaacagaatttaactctattttcataaaaaattagaatttaattccagtacatatttcaaatatagttgatcactagttaacattttacataataatcttttacgtattttgaagatgtataatttcagcaggtttgaagtctttcactcataaaccctacttttcttttaaaaagtattatttcttaaatgcataattagttatgcgttaaaatactaaatttaaaattctggtactattattttaaaattttcgtaagtaaagcttgtgaatataaccgttgtcgagtgaaaataatttgatttttttaatgaaaaaaaaaaaaaaaaaaaaaaaagagggggacaaaattttgacttaactgacataagagatctagaaggtgaaaccacgcgcgtgtggtagtcagaaacgaccaaagaatcaacctcgtccttgataataaaattcttgagattggtcacaccaaaacaaaaaaaaaacgttttatcattgcttcttcaatagtatcaactgacgtaatcatgataagtctacgacaatatccctccaccaaacctaaccgttttggttcaacatttaacaattatgatgagtttaatttttttattggagactgttaccactcttagctttcattatctataacctaagtctggttaattcatgattatgtcaacagtttctttggtcgaattttgatatcgagtttggtttctaggttttagtttccttaaatgtttgtctttacaatgaagtaaagttaaaacaacattgagtgagaaagtggccaactaattctctctgtaccatcaatccaaaattaaattgatttgatttgattaatcaaaaaggtggtcagagaaaaacaaaagaaaaaaaggttttaaatttcttcccgtaccagctagacccagaatcaaagtagcatacttttgctacatattcaaagtaatttaacccccaaaaaccaaaaagaatgtgttagaaaagcaacaagaagaagaagaaagcaaattaatagacaaataatctttcttctctggttgcttctttttatttctttctctggaacagcttttctctgttactttacttctttgagaaactccataatcaaagaggtaagtgattcatgttgcttgtgattatcccaatggttttgttcttttaggttttcggaaataaataattattcttaattaccgagttgtgtataatttgtttttgttagtttctctgatctatcccttgtctaagttatcttttagggtagtttgttttcagggaacaatttttatcagtataatatagggaaaattttccaaacaaaatcgataataatactaatatctgcataaatacaattctagccagtatgtgttatgatcagtttacctaattgggttagaaagatggagttcgatttaagatatcttaaaagttcaaaaaaaaactttcctttttcatgaaaagctcaacaacttcaaaatctttgttttctggctgtttcctcttgtcttcgattgttcttgttctttggatttttttgttttaactttttttttgtctgaaactgctgtttcaatttggaatatgttgcaggagtttttgaggttgaagctgttcctccttggtaaaacagagcaattatgctaacttgcgccgtcttttcaaatcttgaccatcatcaaaatcatcagtaagctataaccatctgtttataaccatttgcttgaatcaagaaaaaaagtttatcttctgtttcttgttatgaacagttgaaaggaatgttcaagaaatggggaagaaaggaagttggttttctgcaatcaaaagggtgttcacaccacattccaaagagaagcagctaagcaacaacaacgtaagaaattcttttaaacactttcattttgttttataaactgaaatgataaattttgagattgaagtgtatatacattttggtgtttggttttgtgttttgaaagcaagaaccagagataaagagtgaaaacaaagaaaagaagaagaaaggttttggaaagaaactaaggaatggagaaaccaattcatttcttcccatttttagacagcctagtagtatcgaaaagatcttgtctgaagccgaacgagagcataaccttgtctttaggccaccaactcccactgatcgagcaaattcatcatcaacctctgttgcatctcctcttgttaggcctgcttctcctaaagtgccttctcaaagatatgtctcttctccaaaacccatttccccaagagttgcttaccctcaagtccattatccgaagcccccttctccaaagccgccttctccaagagcggtttcgcctaggattgtgcagcgacgtgagtttgtgcatagaccagagccaagtctattggtcaaaaatgcttatgcaattaagattcaagcagcttttagaggttacatggtaataatgtaaaacattcttgattctgttttgtcactattaatcaagcagtaaaattcataatttaggagatggaaatttgtttgcaggcaaggaggagtttcagagctttgaaaggtctagtcaggcttcaaggagtggtaagaggacacagcgtgaagcgtcaaacgatgaatgctatgaagtatatgcagcttttagtccgagtccaaacacaagtccagtcacgtcgcatccaaatgctcgaaaaccgagctaggaacgataaagatgacacgaaattagtctctagtcgtatggtaagtgctctcataaaacttagtgagaaaagaagatctctctcagttattcattttgacattaattattgttactttcctgcagtctgacgattgggacgatagcgtgctgacaaaagaagaaaaagatgtgaggcttcataggaagattgatgcaatgatcaaaagagaacggtccatggcctatgcttattctcaccaggtatgcaatcatgactcatctattcttcttcttactcaccataccaatgttatatatgcttgtttcctatgcagttatggaaaaacagtccaaagtctgctcaggacattagaacaagtgggttcccactttggtggaactgggtggaccggcagaagaatcaaaaccaaccgttcaggctaacaccaacacgaccgagcctgagccctcagcctcaatctagcaaccaaaaccatttcaggctcaacaacagtttcgacacgtcaacacccaattcatcaaaatccacattcgttactccatctagacccattcatactccgcaaccatacagtagcagcgtctcaagatactcacgaggaggaggacgagctacacaagattctccttttaaagatgatgatagcctcacaagctgtcctccattctcagctccaagctacatggctccaacagtctcagctaaagcaaaactaagagcaaacagcaatccaaaggagagaatggaccgtacaccggtcagcacaaacgagaagagacgaagttcgttccctcttggttcgttcaaatggaacaaagggtcattgttcatgagcaacaacagtaacaacaagggtccaggttcttcttcttctggtgctgtggtgcttgagaagcacaaaaccctcaaatccgttggaaatttgagtattgattctactgtttcgatgcctgcaacaattgggaggagggcttttaacagatttgcgtgatttgtttttcttctttttttctgtgaaaaaatctgacctttttttcccagttgattcttcattgatttgtttatcttacatcaattttatgagtgctgatgattttgagtgttgtttgtgttcttgattacgaattttacagatgtaacataataagaaaaagtaaacaacaaaaacagaggatttggattgtacagtatgatgttctgtttttctgcttgtaaatcccttatctgtcttttggcccaagtaacaaactttaaccttttcttttgggccagacttcaactataatacgttttgtaggctatattttttcttttaactagattcgaattggatggcttgggtatgcggtatcagtgattacttagctaaattcaaatcatcaagaaatgttcacatgatttcctgcaacatgtcaaaagtcagatcaacttagtttgataagttatgttccacgaaattatgtgaaaattgatttgttttcttctttagtttggtgctttcacactgttaatccacaaagccttgttgtaaatcttgaccaatggcctaaaagtcaaacctttgacttttcagtgtttcttctcaacactcaagagatggatgataatattcacagatgatcaaaatctttcacacaaacctaaaaaacacccaccaatgtctcgtgaacttattattctctgccaaccaattcttgttctgttccttactctgttttacaattctcatggctacttcgtctcacaaggatctgtaggaatcggcttcaacggttacttcactttaaccaacaccacaaaacacacattcggtcaagctttcgaaaacgagcacgttgaaatcaagaactcatcgacaggtgtcatctcatctttctcagtcaacttcttctttgcgatcgtccctgaacataaccagcaaggctcacacggtatgactttcgtcatctctcccacaagaggccttcccggagcttcctccgatcaatacctcggaatctttaacaaaacaaacaacggtaaagcctcgaataacgttatagctatcgagttagatattcataaagacgaagagtttggagatattgatgataatcatgttgggattaatattaacggtttgagatctgttgcctctgcttctgctggttactatgatgataaagatggaagctttaaaaaactttctttgatcagcagagaggtaatgaggctttccatcgtttatagtcaacctgatcaacagctcaatgttactttattccctgctgagatccctgttccgccactaaaaccgctcttgtctttgaaccgagatctctcgccgtatttgcttgagaaaatgtatcttggattcactgcatcgacggggtcagttggagcaattcattacttgatgggttggttagttaatggtgtaatcgagtatccgagattggagcttagtataccagtccttcctccatatccaaagaaaacatctaatagaacgaaaactgttttagccgtctgcttaacggtatctgtgtttgctgcgtttgtcgcttcgtggatcggtttcgtcttctatttgaggcataagaaggttaaagaggttcttgaagaatgggagattcaatatggacctcataggtttgcttataaggagcttttcaatgccacaaagggtttcaaggagaaacaacttcttggtaaaggaggctttggtcaagtctataaaggaacacttccgggttctgatgcagagatcgctgtgaagcggacttctcatgattcaagacaagggatgagcgagtttctagccgagatatcgaccattggtcgtctcagacatccaaatttagtcaggcttttaggatactgtaggcataaagagaatctctacttggtgtatgactatatgcctaatggaagccttgacaagtatctaaaccgtagcgagaatcaagaacggcttacttgggaacaacgtttcaggatcatcaaagatgttgcaactgctctactacacctgcatcaagaatgggtacaagtcatcattcatcgagatatcaaaccagctaatgttttaatcgacaatgaaatgaatgcgaggctcggggatttcggactggcgaaactgtatgatcagggattcgatcctgaaacatctaaagtagcgggaacattcggatatatcgcaccagagtttctaagaacaggaagagcaaccacaagcactgatgtttacgcctttgggttggtaatgcttgaagtagtgtgtggtagaaggataattgagagacgtgcagcagaaaatgaagaatatcttgtggattggatcttagagctttgggaaaatgggaaaattttcgatgcagcagaggaaagtatacgtcaagaacaaaacaggggacaagttgagcttgttttgaagctaggtgtgttgtgttcgcatcaagctgcatcgataagaccggctatgagtgtggtaatgaggattttgaatggagtttcacagctaccagataatcttcttgatgttgtaagggctgagaaatttagagaatggcctgagacatcaatggaattactactacttgatgtgaatacatcgagttcattggagttaaccgactcttcttttgtctcccacggccgctgaaattttaagtttaccactgattctttgtttgctatgaagatgtatcacaactgagattattacacattgtaatacacagccgaatgttttttttcctggtatgtacaagaataagaccacaccgcctcctccaaacatttttttaatccttttgtatttgataacaactcgattattaatcttgaaaatcaattctttttcttagagaccattgtccggtaaatcctatgaaattgaatggttaagaaatcttataatactatactgtttcctctttgatacgccaattcgttaggagtatctgcagaaattatccaaatagaagaacgtgatcaaacaaagctccgattatgtttctatggttcatgaattcaaagaaccctaaacagatgtgatatagatatttaatctactatttcaaaacctttttcgaatccaagttgctgtcaaaagtccaatctactgcctatacttttaacgttgcctgtccatacttatcaccaaagttgcaaaattcaaacctataaaataaacctaaagagatctttgaaacctatgaagacgatgaaaacaatcggaaaactaagaacattaaagatgtggatttgaaaaagaatgtagcgacttgttcgaggccaacaatcaagattagaaaacttgataggcacggagaatcgctatttgttgttgccaaccttcaaggcaacttacgccatttttattttgacgtcattgctctgcaaattggcttttatttaaaaatataattgaaataaattacttagatacacgataaaaaaaacactacaaagccatgaaagacctcctaaagaaaagaaactacgactttgaatcggacttgaagatgattgatagtgtccaagcctttacttatttatataggagaagcagaagcggctgcagaggaagaagaagaaaccctaatttcattgtttttatcaaagccacgaaatcgaaattaatgggccaaaaagcctacttttgattcaaaatgggcccagatccacaaagtagactaacgatgatgtaataaaatatgcgtgcaggtgaagaaagctataatagagtcacaacttggaaataagttttttagactctacgcatatatagaactttccggtagccagcttctccggaggaagcaacaccaacttggctacaatggcagcagcctcatccgccgtgtgagtcccctgaccaccggtcatagacgtacgagtgaaaccagggcataaacaattcacactcagttttttgccgtcgtaacgtcgagccaaaaccctagagtaagcgtttaaggccaactttgagatggcgtagtccggccagttctccggccatccttgcttctcccaagtcccgctcttcacgtcctgcagaaattgagtcaatgtcgcatcgatttgttcattggtaaggtcttcactttctaggattcgtcttatactagggcttctcagtttctgtatgccaagaaaacaaatccaaatgagtcaattatatatatgaagttagtgagtattattgattttgtattcagtataacagataaatatatgaagatctaataactggaacaaattttactaacattttatatatttatatctttgaatatatatatatatatatatatatatatatataaatgctttgacaacaaataaagaagatagatataaaaatgcttatacaactaagatataatgttgtaaaatcattatatcgttttgatattattggatttccgcaatatttgaatatgcaaagataatgtttttaaattaaattgtgtggatggaataaatgtgtgttttgttttctcgtttgccgacagtaggagaaagagattagcgtacatttaatgtgccaagccttgaactcatgttaaggatgcgactaacggagacggaacgccgaaacaacggcaaaagcgcctccgttaaaagcttggcaccgtagaaattggtcttgatgattgtctctggctctttgattaaattctcgcccaccgcgttaaatgaaacggcggcattgttcacctgagcatcacgtacgacgccgtagtaattccataagaaaaagtctcgaattagaaataaatatttgaaaaaaatactgcgtagaatagaatagaatgactttttattttgtctatcaagtatcaactaattcttttatcacaacaatttaaaaggtaatcaaattttctacgatccactggagtttggtcatattttatttagtagttgtggactaattgtctagtatgtacaatgtgtattcattgtaaatattttttaagaacatttatatcagtttgtaattaccagaatgtcgagtattcctaagttgcgaccgaaccaagaggcgaacgcggcgatggaagaaggatcggagatgtcgaggcagcaaaaatgaacgtttccaaagccaatgcggcggagggattcagcggcttggcttccattttcggcgtttcgggcagttaaaactacagttagtccaagctctaataacctcttcaccaccgcaaaacctatacctttgtttgctccggtcacgaccgctgttgtttcttccgaccaccacctccaataatcataacagtaatagaaagttagaaaccaagttaaattatttacaaatttatgtaagaagggagtttgcacacaaaacctatttgttggagaaagaggagggattagatgattcatttttttgtttttttttggaaagcaacaaggtgatgtgatatgtaatgatgctaacgaatacttgatgaggggattatatatatataattacatgatagggttatgtaaatggttctggatctgaacacatgcatattaattgatttataaatacataatatattgatgtgttcgtgtctgacggtgccacaaaacaataagaatataatatccaataactcgtgaataatgccgtaagcgtaaatgatgtaagttatcaaaccatacatcaacgtgacaacgtccatgggttcttataagttacaagttttgcatattcgacttttatttagttttctttctccacgtttaacgttttagaccacaaaaccaaattgatttttcttatagatttctgatattattgtgttttttttctttccttttgatgaaagaagttttggatgaacaaaagtgaaatgttttatgtctgtatatatatattgacccctaatttggtaatactactaggtatagccattcattttattgtatccaatgtcattaaggaatcttgaactaatttttttcccttttatatcgtaaacctttatgcactctcttttacaaatacgtgttattcacttatagtatttggcatttaatgaataacttcgacctataagcaaaagctattgaaacgtttctttggtgttagataattttggattcaaacatgtcccgtacctatcatgttttaataagtgcggatcagatccgaacgaaatatttagagtagttgagttgatatgaatgcatattattgcagtggtctagaagaaaatgggagtagattagtattgactaagagcctttagttaattgtttaatgctttgcatgcttcaattaagaaagcccattcagtttagacataacattatgtctacttggttttgtttaaacaattacttagtttgaaaacttcaaagttctttatgacatactccctccatttctatgtaaatattaaatgtatttaataatttttgatcaatcatataatacattatactccctctgttcctttttgtttgattgtttagaaaaaatacacatattaagaaaacatattaaatgttgattataaatgtattattttcagtgttttacaattttctatacctctaaaccaatgataattaactatttttcttgaaaaattacaattcaccaatactaaccaataaatattacatggaaaacttcaaaaatcaatcttttagaaacaaattttttttctaaacaatcaaacaaaaaggaatagagggagtagtttttattggttgcattcattctatttaatgatatttttataaaaaaagagaaaaattatatatttttttaatctgtttgtaacaactttaaacatcacttaaaaagaaacggaaggaatatatgagagttagtgagatttaggcatgtgcttgcttcatcattgggcttattaatttataaagtttaaatttatcaagcataatataatatgaagtcagctttgccgccacagttgatgcatggcctctaattattggagcattgtacgtgatataggtgttaatggagatggtttgtaggtctttatcaatacggaatctttatcttaccaagtcatttctaagtgttgcatctatgtataaactaatattggagacttcaacaaaaagtagtatatatatacatggtttgcacattgtgctatatatatgtttagatatataactcaaaaacacctttattgcttaacagtctttggtcggaggggggtttggtgaggaagacaatgaaaattattattattaagagaaaagggaatctttctggtttcaacacaaactaatctcccaaaaaaaataaaaaataaagctagcaatatttagaagacctaaaagagttaattagtgactttaatgtgaaactttttcataaaaaatgaatgcagcgatttgttggaggccaggattgcaaattgtttttaaacttcgaaagcaacaaagataaaacatcttagaaccctaaagtaaatccttgacgttagagaaacaagcttacttaaaatctaacttggagatgaaaataaagatttactgatttatgtaggaatacgaaaccctaatttcttgatttaaatcaaaatggaagataaatgtgcatcaaaactctgttttgtgtgtaagattcttcttacaggtttcatcttccatgggatataaaagaatttgtgaacgtcaatgtagcaaatgaattcacatcaagtagtatttccattgatgtctcaggacgtcctttcaatatctcatctcttactacatcaagaagattttctggaagctgcacaacaccattcaatatctgcataaccacactcatatccggtcttattgactcagattgatgtgaacacaacacacctagcttcaaaaccagctcaatctctcccctgttttgttcttgacgtatacattcctctgccgcatcgaaaatgttcccatttacccaaagctctaagatccaatccactagaacttcttcattttccgcttcacgtcgctcaatcaaccttctaccacaaacaacttcaagcataaccaacccaaaggcgaaaacatctgtgcttgtagttgctcttgttgaaagttaaacttgattttgaatcaagtttaattattggatcaattatccaataattaattatggccaaatccaagttctagagttttctctagaaatatcatcatttccacctccttaaaggattctagaaattttctagaatcatcttccacctccttaaacataaaaatctagatactctaatagaataatctagataatttgaataatgtaatctagatcttatgtaagaactctctagacttaagattaaaatattttagatattttgtagtttggaggctataaatacctcctccccctctcaaatgttgtaatgttgtgaagttgtattcaagtttaaagcaaagtaataaaagttctatttcctaaaaaactctctcaaaacacttaaacactttctccattacctctaaaagaattttactctaacaaagtggtatcagagcttgaagatcctaaagatggcgagtaacaatgttcccttccaagtcccggtgctcacaaagagcaactatgataattggagtctacgaatgaaggctatcctaggagcacatgacgtgtgggagatagtcgagaaaggtttcattgaaccggagaatgaaggtagtctttctcaaactcaaaaagatggtttgagagactcaagaaagagagacaagaaagctctctgtctaatctatcaaggattagatgaagatacgttcgagaaggtcgttgaagctacgtcggcgaaagaagcatgggagaagcttcgaacctcttacaaaggtgccgatcaagtcaagaaagtacgtcttcaaactctaagaggagaatttgaagcactacaaatgaaggaaggtgaactcgtctccgattacttctcaagagtgttgacggttactaataaccttaaaagaaacggagagaagctagatgatgtgagaatcatggagaaagttcttagatcattggatctaaaatttgagcatattgtcaccgtcattgaagaaacaaaagatttagaagctatgacaatagagcaacttcttgggtcattacaagcttatgaagaaaagaagaagaagaaagaagatatcgtcgaacaagtcctcaatatgcaaattacaaaagaagaaaacggccaaagttaccaaagaagaggtggtggtcaagttcgaggacgaggtcgtggtggatatggaaatggacgtggttggaggccacatgaagacaacacaaaccaaagaggtgaaaactcatcaagaggtcgtgggaaaggacacccaaaatcaagatacgataaatcaagtgtcaaatgctacaattgcgggaagtttggacattatgcttctgaatgtaaagctcctagcaacaaaaaatttaaggagaaggccaactacgttgaagaaaaaattcaagaagaagacatgttattaatggctagctacaagaaagatgaacaagaagagaatcataagtggtacctcgatagtggtgcaagtaatcacatgtgcgggagaaaaagtatgttcgcggagcttgatgaatcggtgagaggaaatgtggctttaggagatgaatcgaagatggaggtaaaaggtaaaggaaacattctcattcgattgaagaatggagatcatcaatttatttccaacgtttactatattccgagcatgaagacaaacatcttgagccttggacaactcttagagaaaggttatgatattagattaaaagataataacctttcaataagagacaaagaaagcaatctcattaccaaggtgccaatgtcgaaaaatagaatgtttgtcctcaacattcgaaatgacattgcacaatgtcttaagatgtgttacaaagaggagtcttggctatggcatcttcgattcggacatctaaattttggaggattggagttgctttcaaggaaggaaatggtgagagggctaccttgtataaatcatccaaatcaagtgtgtgaaggatgtctacttggaaaccaattcaaaatgagctttccaaaagagtcaagttcaagagcacaaaaaccgttggagctaatacacaccgatgtgtgtggtccgatcaagccgaaatcacttggtaaaagtaattacttccttctctttattgatgatttttcaagaaaaacatgggtatattttttgaaagaaaaatccgaggtgttcgaaattttcaaaaagtttaaagcccatgttgagaaggagagtggtcttgtgatcaaaaccatgagatccgacagtggaggagaatttacatccaaggagtttcttaagtattgtgaagacaacggcattcgaagacaattaacggtgccaagatcccctcaacaaaatggtgtagcggaaagaaagaatagaacaattcttgagatggcaaggagcatgctcaaaagtaagagactaccaaaagagttgtgggcggaagcggtcgcgtgtgcggtttatctattaaatcgatctccaacaaaaagtgtctccggaaaaacaccacaagaagcttggagcggaagaaagcccggtgtttctcatttaagagtctttggaagtattgctcatgctcatgtaccggatgagaagcggaacaaactagatgacaaaagtgagaagtatatcttcattggttatgataacaactccaaaggctacaagctctataatcccgatacgaagaagacaattattagtcgaaatatagtgttcgatgaagaaggagaatgggattggaactcaaatgaagaagattataacttctttccacattttgaagaagataagccggagccaacaagagaggagccaccaagtgaagagcctactacaccaccaacttcaccaacaagttctcaaatagaagaaagttcgagtgaaaggactccgcgttttagaagtatacaagagctctatgaggtaaccgaaaatcaagaaaaccttaccttattttgtttatttgcggagtgcgaacccatggatttccaagaagccattgaaaagaagacttggagaaatgccatggatgaagagatcaaatcaatacaaaagaatgacacatgggagttaacttcacttccaaatggacacaaggcaattggcgtgaagtgggtgtataaagcaaagaaaaactctaaaggagaagtggaaagatacaaagcaagattggttgcaaaaggttatagtcaaagagccggaattgactatgacgagatatttgctcccgttgctcgtctagaaacggttagactaatcatctcactagcggctcaaaacaagtggaagatacatcaaatggatgtcaagtcggccttcttaaatggagatcttgaagaagaagtttacattgagcaaccacaaggctacatagtcaaaggtgaagaagacaaagtcttgaggctaaaaaaggtgctttatggattaaaacaagccccaagagcttggaatactcgaattgacaagtatttcaaggagaaagatttcatcaagtgtccatatgagcatgcactctatatcaaaattcaaaaagaagatatattgatcgcatgcttatatgtagatgatttgatattcacgggtaacaatccaagcatgttcgaagaattcaagaaagagatgacgaaggagttcgagatgacggacattggattgatgtcttactatctcggaattgaagtaaaacaagaagacaatggaatattcataactcaagaaggctatgctaaggaggtacttaagaagttcaagatggatgactcaaatcccgtttgtacaccaatggaatgcggaatcaaactatcaaagaaagaagaaggggaaggagtggatccaactaacctttaagagcttggttggaagcttgagatacttaacatgcacaaggcccgatattttatatgcggtcggagttgttagtcgttacatggagcatccaacaacaactcatttcaaagcggcaaaaaggattcttcgctatatcaaaggtaccgtaaactttggcttacattattcaactactagtgattacaagcttgttgtatgccatgctatttggttaagaaacctcttgaaagagttaagcttaccacaagaggaaccaacgaagatctttgtggacaacaagtcggcaatagctttggcgaagaacccggtcttccatgatcgaagtaaacacattgacacacgctatcactacattagagagtgtgttagcaagaaggacgtgcaattagagtatgtgaagacacatgatcaagtagccgatatttttaccaagcctctcaagcgtgaagactttatcaagatgaggagtttgcttggagtagcaaaatcaagtttaagagggggtgttgaaagttaaacttgattttgaatcaagtttaattattggatcaattatccaataattaattatggccaaatccaagttctagagttttctctagaaatatcatcatttccacctccttaaaggattctagaaattttctagaatcatcttccacctccttaaacataaaaatctagatactctaatagaataatctagataatttgaataatgtaatctagatcttatgtaagaactctctagacttaggattaaaatattttagatattttgtagtttggaggctataaatacctcctccccctctcaaatgttgtaatgttgtgaagttgtattcaagtttaaagcaaagtaataaaagttctatttcctaaaaaactctctcaaaacacttaaacactttctccattacctctaaaagaattttactctaacagctcttcctgttcttagaaactctggtgcgatatacccgaatgttcctgcaactctcgatgtctgaggatcaaatccctgatcatacagcttcgccagtccgaaatccccgagcctcgcattcatgtcgtggtcgattagaacattagccggtttgatatctctatgaatgatgacttgaacccattcttgatgcaggtggagtagagcagatgcaacgtctttgatgatcttgaaacgttgttcccaagtgagccgttcttgattctcattcgtgttgctacggtttaaatacttgtcaaggcttccattaggcataaaatcataaactaagtagagattctctttatgcttacaatatcccaaaagcctgactagatttggatgtctgagacgaccaatggtcgatatctcggctagaaactcgctcatcccctgtcttgaatcatgagaagtccgtttgacagcgatctctgcatcggaacccggaagtgttcctttgtagacttgaccaaagcctcctttcccaagaagttgtttctctttgaaaccctttgtggcattgaaaagctccttataagaaaacctatgaggtccacattgaatctcccattcctcaagaacctccttaaccttcttatgcctcaaatagaagacgaaaccgattcctgaggcgagaaacacagcaaacaaggccagcgttaagcagaccgccaaaaccgtccttaatctgtcagacggtttcttcggatatggaggaagggtggggactcttccgaactccaacggttgatagactgcttcaggatatgtgtacaccagcaccatataatggagcgctctaatggatcccgtagatgctgtgaagccaatatgcatgtgtttcaaaacatactgcgagagatctcggtttaatgacaaaagtggtttgcgtggcggaacaagaaactcagcagggcataaggtaacatcgagctttgtatccggatgactataaacgatcgaaagccgcattaactttccgctgatcaaagaaagatttttgaaacttccatcattatcatcatagtaaccagcagaagcagaggcaacagatctcaagccattaatgttaatcccaacatggttatcatcaatatcttcaaactcttcgtctttatgtatatctaactctatagctatcacgtgattcgaagttttaccgttgtttgttttgttgaataatccgaggtactgatcggaggaagctccgggaaggcctcttgtaggagaaaaagcgaaagtcataccgtgagagccttgctgcttatgctcagggacaatagcgaagaagaagttgatggagaaagactggtccttcatttcaaatgttgtgttgtcaaaagcttgaccgtaggaatgcttcgtggtgttcgttaaaaccaagtaactattttcgttgaaaactgcagatccatccaggatatatgtgccatgggagttgtaagtaaatgaaaacagagtaagccactgaacaagaactatttgtaagactttgacttcactaaacatgttcttgttcgttttttttttttggcttatgggaaggttttgatcgtaatgtgatatttatcagaagaattatgtaagaagatacaacataaaaataagtaaaactgtatgaatatgatcaagccaatataatgtgaacgaaactggtcatgtcataaacatatgtagtttgtatttaattacccacatggcctagatgatcaaaccgcaacacaataaacaaataatcttctgatcatttttcaattaataatagcaattattgtgggattgtcagagtgtagaagcggacccatgttaggtttgcaaacctattttactactgaaattttgctatattggttatgagattatgacatcctatttgctttttgtattttttttcttctttttacaaaacattattgttaattattctcttgaatctcttcttatcgttccattaatgtgttgattagtcttaggacttaaactattgttattgttgctgtttacctattgctgttaattatttatctaatgaatattcatgttatatgcggccaacgaactaagataagtaagcaaacttaagagagaaaaaacacatgtacactatttagtaattacgcactgtgcatggccaagataaagtcgtaaatcaattataagaaaacaaatcttctaattcttgctaagattaaatagcgattatagtggaaagcataataagcaataatcaaaaaaacttttcttctcagatctctaccaaagaaataaaaaggtcaaaaaagcttctcttatcttttctacaacctaatccgtcgaacattacggagcgtagaaatggataaacaatgtaagtttaacaaccaacgtgttgaccataaaatgtaaaaaaaataagttttttgacatgttttaatgtaaagtttaacagattttgtattggtctacagaaaaaaaaaagttaattaagttataagtcattgctcttgaaaatttggttttataaacaaattcgaacaagattactttgaaagcaagaatgaaacaaacatattataaccctaaaagtaaaccctagaaatttagggatgaattggaaggcattcatgattcaaagatacagaaacatgtactcatttatcaaatagacggatacagaagctcccgatggaatataaatgtttgatcaaaactaacttatttttatggtttcagcgtccatgggacacaaaagaattcgtcaacgtcattgtaccaaaagaattcagatcaagaccaagtagtacttccattgatgtctcaggaattcctctcaatctctcagccctaacaacatcaagaagattattgggaagatgcgaaacgccattcaagatctgcaaaaccgcactcatgttcggtctaatcaattcagtgtgatgtgcacacaacagacctagcttcaaaacaagctcaatttctcctctgttttgttcttgacgaatactttcctcagctgcatcgaaaagtttcccactttcccaaagctctaaaatccaatcaacaagaaccgcttcattttctgctgcacgtctctcaatcaatcttctaccacaaacgacttcaagcataaccaacccaaaggcgtaaacatctgtgcttgtggttgctcttcctgttcttaagagctcaggtgcaatataacctaatgttcccgctactctagatgtctgaggatcaaatccctgatcatacagcttcgccaatccgaaatccccgagcctcgcattcatgccgtggtcgagtagaacattagccggttttatatctcgatgaacgatgacttgtacccattcttgatgcaggtgtagtagagcagttgcaacgtctttgatgatcttgaaacgttgttcccaagtaagccgttcttgattttcattcgtgttgctacgggttagacacctgtcaaggcttccattaggcataaagtcataaactaagtagagattctctttatgcttacaatatcccaaaagcctgactagatttggatgtctgagacgaccaatggtcgatatctcggctagaaattcgctcatcccttgtcttgaatcatgagaagtccgttttacagcgatctctgcatcggaacccggaagcattcctttgtagacttgaccaaagcctcctttcccaagaagttgtttctctttgaaaccctttgtggcattgaaaagctccttataagaaaacctatgaggtccattctgaatctcccattcttcaagaacctccttaaccttcttatgcctcacataaaagacaaaacctattccggaagcgactaatgcagtgaacacggccaacgttaagcagaccgctaaaatcctccgtgttctatcatacgacttctttggatatggaggaagggttgggattacgccaaggtcccatgctggatatataactccttcttcataggaaaattgcatcacataatagagtgctccgatcgacccggtcgatgccgtgaaacccaagtacgtctcctccaaaaaatagggcgagagatctcggttcaaagacaagagcgatttttgtggcggaacagagatttcagcaggtaataaagtaacattgagctgtttatcggtgtgactataaacgatggaaagcctcattacctttgtgctgatcaaagaaagctttttgaagtttccatcttcatcatcatagtaaccagcagaagcagaggcaacagatgtcaaaccattaatgttaatcccaacatgattatcatcaatatctccaaactcttcgtcttttcgtatatctaactcgatagctataacgttattcgaggctttaccgttgtttgtctcgttaaagattcccaggtattgatcgggggaagctccgggaaggcctcttgtaggagagaaaacgaaagccataccgtgtgaaccttgctgcttatgttcagggacgatcccgaagatgatgttgaatgagaaagatgagttcttgatgggaacgggagtgttgttgaaagctt

SEQ ID NO: 114 - DNA, 109155 bp, Arabidopsis thaliana
aagcttgaatctttaggttttagtcacgtttacgaaatatatattagcttattagaagtgtggttttcatcattgggttgatctaatgctctaagctaattttgtttttgttgatgtggaacaggttcttcaaaacgatatcgatctgcttaacccacctgctgagcttgagaagaggaagcacaagctcaagcgtcttgtccagtctcccaattccttcttcatggtaatcaaaattttaaagctttctccttctcttgaaccctttagcaaataagtctctgtgattagaactgtatgttaatttggagtttaatgattttctcataatccctagctttgacagtgtgttatgtgatggcgatttttggatgtaagtttgagaatctatgtaactagtttcgagtttgtgaattgtatgtatgttttgagtttgtgaatttgatttgtatctgattctcatttactcttttatggactctgattgttgtttcttttcttgtatatcttactactgtaggatgtgaagtgccaaggctgcttcaacatgtaagttctgaaaacaatctctttctttttcgacattattacacatatatagaggaacataatcttatcgggttctgttttggtatcgcagcactactgttttcagtcactcgcagactgttgtggtgtgcggaaactgccagacaattctgtgccagcctacaggaggaaaggcaaagctcaccgaaggatgctctttcaggagaaagggtgattgattgaagcaatcatcaaaataatgaaggctgttttctttttcttttttttttgttgttgttggctatgatgttatctctggaattttaaaatgtttggatttttaatataagtaagcagagtttgctcttttacttttgagattatccccaagtctaaaatagtttactgcttgcttgcatctaatccatttggtatctcaaaatactcactttgattggttgtttgtactttatatttcgtcaaaaaaaagtaattaaagaagttaagaactaaatgttggtacgtttgtgtttgaactttgaagcaaccgttatgcaagttttttatcaagctggtcgccaagctcccaatcgttatggatcccaaacgttgttttaaaacactgaagaacgaggttgttgctagaagaccaaagacatatgagagtaaaaaagcctttcatgaacatttcagggctttctttgatcaaattggtaacgaatccatgaaagcaaatccttcagtgtcaactattaatatttgaaacaaccaatggtaaaggaggactgaaaactggttggtattaaaaaagagacaagcttatgatgatatctgattcaatcggtaagcttcctgaaagagcatcctactgtgagcttggccttgcctcctgtaggttggcacagaacgttctgacactttccgcataccacgactgtctgtgagtgactgaaaatagttgtgctgcagtaaaagaacaaagcccataataagttttaagtttcttaatttatcttatgtaacaggaaaatattgatttcaaatcttacatgttgatacagtcagagcacctaacaagctacagtaaaattaaacaaaaatcagagtccacagaaagagtagataaacttcatacaagtaaattagaatccgattaaaaaacttgaagtattacagtttctaaacagagagatttggtttttacaggattctaaataaggagaaaggtttcaaagttttattaccatgaaataggaatttggtgatggaacaagacgcttgagcttatgcttcctcttctcaagctcagccggaggattaagcagatcgatatcgttttgaagaacctgttccatatcaacaaataataacaattaactttgcatctcatcagtactcaaatcaaatgacacaaccacacttctaattagcttacttcccatctcgttaccgtgattaaaacccttataacaaaatcaaatcaggagatgtaaatggagagcatccagtgcaagagatctaaccatcttcgcaagactctcaagagacgacggcgaaagctagcaagcaacggcaacaattcgcgagagaggtttttataattactcactgccggttgtgaacaaacgaggatgggaatatattaggtttacttagttacttggagaccaattaatctgaaaatcttctagaatgggcctagagcatctacatagttaagaaaacacaacaaatttgacctttcagtcaaagtagaggctttatttacattctctttttttttttttttttttttttcttttttttttgaacacgaatttacattctctttttatccataaataaacaaacaaaaaacatcctaaatttgtctagttttttttttttttttttttttaactttttcttatgtaagtcttgtttccaaacatttttcagtatgtagagagaatttcaataatatactaatactacatccataaggcacactgcattaaagcaaccatgaggtgaatctgattctggtagctaagattcataacatcaaaactcctcaattacgaatgatgtggttgcaaatataaactcaaagtaataacaatgagccagagattacaaaggtttgtggaatgttcatcacaagtagttggaaacgatcaaaatgatcaaggctctgctatttcaatattcatccaccgtgcagagtcgaaatgaaaactataacatctttatcttctaatgttgtatcgagctgaccactaagttcccaatcgcagtcattaaccagcacgagaactccaggcctcctgcgtttatgaattccaaaccaccattgttattaaacactaaaaacagagttcttgctggaaatcaaggaaagaaaagagagaagctttacacggtatcgcctttcatgaacatttcaggcctttccttgatcaaattggtacgaacccatgaaagcaaatccttcattgtcaactgtactgaatgaaacaccagtgagaagttttacatgactataataaactcaatggtatttaaaaatcatcaaaagagagaagcttacgatatcagaatcattgagtaagttgatgttaactttatgaatctttacggagtcacagagcaattctaaacctccactgcaggagatcaacaagcacatattttcatgttaataccaatacgaaactctcattcactaccaattgatctgatgatgaccggaatgtaaaaagtctaaagtcatttatgattttcccaatccaaaaatcattactttattagcactgaataagcaaaacaaagataggcttatgctacaaactgtgcattataatatcccaagcaaatagagaaaccataatctaaagcactaagttttcagttttttcccgaccaataaacaggcattgacatttgagagtcaatcaaatgaaatcaaaatataaaccactatgagagtgggcaaatgacacaaacgagtaatagtgtacccgaactcaagagtaaattgcatcttcaatgaagttttgcggtaacaaaacccttcttcttctttttcttcttctccgattctctccgataggatctccgctttgagttcacgcaaaactccatacgacgtcgttttcgttttcttggtttgggcccttaaagttaggcaacatgatcaccaaatatcaaagcccttcttaaaaatacccaaacgcttattgaaacagaatcacaacagtttgttttcttaggcaagaatcaaaacagtagacattctccggcgtgtgacattcaacacgtggagatagcgcacgagaacgagatctttccgcgtcatcatttaaaccgtagatatcacatagaagaataaaagtttccgccacgattccgccgaataaaaaaagaccatataattcgacagttttcaattgtggctatatctcatgtgacattcaacacgtggagatagtacaagaacgagatctttccgcgtcatcatttaaaccgtagatatcacatagaagaatgaaagtttccgccacaaatccgccgaataaaaaaagaccatataattcgacagttttcaattgtggctatatctcatgtgacatttaacacgtggagatagcacgagaacgagatctttccgcgtcatcatttaaaccgtagatatcacatagaagaatgaaaatttccgccacgaatccgccgaataaaaaaagaccatataattcgacagttttcaattaatacccaaagtgtaccgaaaatatttttacccattttgagtgtcagctatttttttgaacattttgtttgtagtttgagtgttttctaacgttcgtttggtgttttttggtcaagattggtgttgactagtttcgactagttgtttggtattttttactcaatcgcaattttgagtttctttcactagcgctcgtttgttatttttgttggttttattcgctttgagtgtttagactagcgattgtttggtattttttaatcaatagaacttttgagtgttttttgactagcgattgtttattgttatttttgtgttttcctctctacgttcactctctgtgcccgtgttcaccctatacatatatgcatatgagacacgttcacgccttgcgtaagcacattcactccctatcatacatctattatggatatatgcatgagacagtcacaccctatcattcatctattatgcatatgagacacattcatgccgcacattcatacatctattatggatttatgcatgagacattcacaccctatacatctatacatccttcataaacaaaaatacacatattgcatatacacagccgtgttaacaacttcaaaaggctggccagtggccaagcgcttcaatggggaaactctcggacacacacagtcacttgtccaccctctgcaaaatcaatagaaatcttcaatacaatttttttctctactagtcaacaatttcggtacatgcataagtacgtttcttacaaaaaaaaaaaagaggaaaattctctcttggttttcacaacaattataaacccattctacgttttcttagacataacatataaacaactcataaaaccatcacacataaaattaatctcacatcaatgaagtcatcaagtcaatatactggatgtacaattaacgaacaaacatatataactaaaaatcagttttattaaagacgtacatatatatatatatatatatctaaaaccagtttacgatcagagacacatcattagagtcaagatataaaagggatttaaaacgtttgttgaactccataatttttttttgaaaattgacgaacaaggttattaacagagactgacaacaatcttttaatagtaaacaaactatagattatttacctgtaagatgttgcctttatgtttgcttgagagactttgagtgacaacacaagtgtgaggacggaacacaagtcggcgaacagaactaagatgataaaaacagagtgtatttaacatttgtaagaaaaagaacaaaagaacgagtaagagaattcagatcatctgtccgaagaaagtagtacttatagagtccattatcttaatttttctattaaaaataataattcaaacagtcataaaatgttaccgtttcacaacgttcgtttattcctaatctcaaggcagactcgtgtaagaataagagtccattatcttaattattttcattaaaaatatctaattcaaacggtcaaattaaaatgtagaaaaagttttcaatttaaaatatttattcaaaaatgttaccgttccgcagcgttgatattttcctactctcatcaagtcaaataaaaaaaaacgtttaaataaattgggaactcgtaaagtaaacagtaaacacatccaagtaaatgtaatttaattaatttttctgctatcaatcttttgaattattcaagtaattatataattattcttcacgactactactgctgctgctactactactactactatttgaaaggcatcatctacttaattatggtcttccactgcattcattgatgatttatgttgtctaaatttccataattcctttttaattcttcgattctttttttattcttctttttatgtttgtgtgtgcttctctgatatgttaataccagtttcaagtctactagtagaaagtaaattcgattgatatcgttcattaacaacaacacatactacactattaccaatatgaaacggttgagttcttttctatttgttctttaggacggttaacaaaaaaatccactaatcgcaaaaaaattagtggtacatacttatcccatatataacctccaaacaataaatcaacgagaactctaacaaataattgaaattaaagaaaagagtatgtcttgtgaaaaaaaaaaagaaaaaaaaaaaaaaaaagagtatgtcccgatagtaaatgacctaaacgcttcgtcgtgactcaatgagtccaaaccaagacaacgaaacccatcattggacaaagttggtctcagcatcacttcttgcattactctttgtcaccgaagatccttcaccttgctcatagtgttgttgaaacctacatatgtatcatattcatattatatatgtatccaataaggccaaatttattcataaaaccatgacttgtatttcatcagtagagaagcaaaaatatcgattattacgtacccaatctgtaaaaaatatccaaggttgcaatccgatatataattttgatgagttgattgcaaggaaaaatcagtggaacaaccggcggtgagcaccgggttaagcagtaggtcttgaaagcctttaaaatcatgatcttctgtctcaagctgattatgaagattatccattttataagatttatgagtagacaatacactaattaactaacacaaaatcatagtaactaagaaagacttgatatataatttggatgtccagttaaaaacattaacctttagcttattgtttatatctccgagctccctctcctgccattccaaatacaaaaatgatatacacatgagtacatttacatacaatgcatgcatatattgtagaacatcatttcgagtacttgcctttctccgaagctcttccatttgttccatcataacctgcgtctatatacatacatgcatataaagatatacatttcaataatgtattttgcaggtctaaatgatgcgcaagaaaaattggtctacgtatgaaatatgtcatgccttttgttttcgggttgcggaaagagctccttcaagctgtctctccagcgtctgcaattcctttatactcatcccttcaagatcttccccaaccaaattcctttttcaacgattcaaaacgattattagtagcagaaattaggaaatgtacaattataggaagtaatggattacgaggagtacgattagttaaacctatgagtgcgaagaagagattcgtatttgcatttgagctttgtcacctcttgacgcaagccctgcaccaaaaagcagaagattaactacaatttatcttagctctatttattttatacatcgttataatataatagttagtttgactatgtatacacttagaatgaacaaaggtcaaatttcgtatatatataaagataaaatgaacatacttaagaaaaaaaatgattgacctgagtatcttcaagcgtatcattgtccaaaagattgtctttacagcgatagtacctctcaatggttctgccaactctacagtttataaaacaaaagaaaccacaagatattttaattaataatctgaatttgcttaaattcaaaaccaaagaacgaaaaccttaagttctgtgttaacttttaatgcatgtctaaaggaaattctaattacacaaaaatctctgggaagatatatctgcgtaatggattatagatctacggctacccatgataaaccctaattaatttctctaattagaattagaaagacatatctatttaaagaggcaaaacgtatatatgaggtttcatggatcttaaggacatacacatatcaaagctggtgataacaattaaaacccaaaataaaacaaagaagttttctttcaaaagatttaccggatctaaaagctaaactgacccatatgtccgatggatcctgagagatcgatggatggtgatcaaccttaactagttagggttagaataaaaagacataacctttttcagatacccacaagacagaatttggtttcttgatcttaagaacagacacaaatcaaacatggatgatcttaatcatattacccatgaaaacctaggttttcatcattaggaaaaccgaattaatgatcttgaatgaatggatatacgtacccgacattgctgaactcgtagagcttgccaccggtggagaagattatgagagaaacctctgcatcacaaagaacagagagttcgtaggctttcttgagcaaaccactttttcttttggagaaggttacttgtctagtgatcttgttctcaattctcttcacttccactttgcctcttcccatctctcactcgctctctctcttctttctacgttgtttcttgtctttaatatctctcaatgttggaagtttacatgtacatatcaatcaaaatgaattactttagttctattgctggatatacgtaaaaaaaaaaagcgtatttattaaccctatagtttctctttttcttatcaacctatttcaaccctacatacatagtggaaccgagttttatctcaataggacaatatctcatcataaattacaaagttctcatttcaattaccatgcaagaagaattcactttccgtttattaattatagctagagtgtaaaatggtaatgatcttactgttgtttgacccaaatgaaaattcttttggtatataaaaaattaattgataggaacaaaacgaaaactttctcctacctagaattagaagtatggaaatacagttggaccactggaaaaatcatcattatttcttttaatatcagtatttgatgacatattgttcaaagttcaaactggcactcaagaaaaattgatattcttttttgatatgcaacagttggaccaaacctttttacttaataaagtttacatctattgtgattcttcaaactaacacttatataaaactgttttttttttgttcaatggctatgatttcgtcaaggttaatttgtacatgtaaacaattaaacgttcatccactaaatgttgttcaacctgaaccgatgtggagtcagtaaaaaacatataagacatcgaccctaatgacaaaaaacagagtgtaactatattacgtgtgtgaagtttattactagttcgggaagttttaattggtcaaaaggcgcaggaaggttcatcatttgttgttgaaaagttgcattccttttcaaaagaaaaaaaagtaaggtttttatgaaaaagcctttcaagagaaaacaaattttggttatatcttatttatatggtttgacaactgaatcaaacatttaccaaggttgtatttgatcattattactaaaaataaaatcagctaaaaaaaaaccattactaggtctagttacagtgttacactgtattgtaaatcatttagtaataaaccaaacaaattactatcatcatttttaatttgtgtagtcattacatacatgcaaaattgtaaattaaattataaaatcatgccatactatactgctagatgaaaattgaattgtcatatcaaattaaaaattaatgtattttcatgaaaactggaaaaaaaaaactattaaattagaaaggcgaaattcaacgtgacgcatctatctatataggcttgggcttataatatatacaaaagcccagttaattattaatgggtcgaagtcgaaacttgaaagcaagcagtgtcatcgttctatttatcatcagcccaaaaaaggaagaaaaaacaaatcaattttatgttcgtttggtataatatcgattttaattttaaccaagtaaaccggataggaggagattcgtaaattgtaatcgataaaagagatctgtgtcaaaagtacgcgtgaggttctctcttctctgcaaacaaaaatcctggcgttgatagcgattggttaattgtcggtgaatcaacgtttttctgttacacatatcaatcaatcatcatcctcttcatactctcttcttcttcttcatcgtaatcattagcttcaattccgagttttctcttcgtcgccgttgtgctagagttttgtcagatctcgccgggaaattagcaatggcgttttagtctgtttacctgtgaagcttttgcgtaaacgctggattcttctcaaatctctctcacctgatctcttattagattccgagtatgatttgtttctctccttcattatattcgggttgcttccacgatttcgttgcttgatttagttttttttttgaatttgatagggatggcgctaaagcgagggctatctggagttaaccggattagaggaagtggtggtggatctcgatctgtgcttgtgcttctcatatttttctgtgtttttgcacctctttgcttctttgttggccgaggagtgtatatcgattcctcaaatggtatgcatatattgcttatctttctatatactaatttgcagattcatgtatagagattcagaaattctattaatgattgagaacattagcatagttttaccactctttagttttcagcctttactatctcaattttaagttacttttagcttgatgtgacactgatgatattcagacaattgctatttttctagactggcaaaattggttctttgctattttactatcgagctttggtttcaaggattagtgtctctcgattttgtgttacatatataatttatctgcgaattgtccatctgatggagcttactttcattactgcagattattcaattgtttctgtgaagcaggtatgtcggcttaaactctatcaaattatctacttgtatgttttgacagaagtaagaatgttgtttgattggactgtttttttttgttttttttggcagaatcttgactggagagaacgtttagcaatgcaatctgttagatctcttttctcgaaagaggtagtttaaatctttgaaactttgcttcgatttattgtctttgtcagtttttctgagactggatagtttcttactaaatttgttgtccagatactagatgttatagcaaccagcacagctgatttgggtcctcttagccttgattcttttaagaaaaacaatttgtctgcatcatggcggggaaccggagtagacccctcctttagacattctgaggtgtggtttaagtgtctcatttcttttctaagcttctattctcaatgatgttttctcatagttttcatcttttgctgtacttgaggcagaatccagcaactcctgatgtcaaatctaataacctgaatgaaaaacgtgacagcatttcaaaaggtagtggcttttaatttaagtggcatctctgatttgacgttttccatctctgattcttctatatattgctgatgcagatagtatccatcagaaagttgagacacctacaaagattcacagaagggtaactattatttattaaagttcaatgtcatgatgcatcaaatactctttagggacttcttgtgtctttagtatttcattatcaacattttttttatccatcttgacatttcagcaactaagagagaaaaggcgtgagatgcgggcaaatgagttagttcagcacaatgatgacacgattttgaaactcgaaaatgctgccattgaacgctctaagtctgttgattctgcagtccttggtaaatacagtatttggagaagagaaaatgagaatgacaactctgattcaaatatacgcttgatgcgggatcaagtaataatggctagagtctatagtgggattgcaaaattgaaaaacaagaacgatttgttacaagaactccaggcccgacttaaggacagccaacgggttttgggggaagcaacatctgatgctgatcttcctcggaggtaaattactccttttggtttctactacttgccttttttcgactgcttgtgtacttcttaaagtaacatgctctctaaattacttttcatatagtgcgcatgagaaactcagagccatgggtcaagtcttggctaaagctaagatgcagttatatgactgcaagctggttactggaaagctgagagcaatgcttcagactgccgacgaacaagtgaggagcttaaagaagcagagtacttttctggctcagttagcagcaaaaaccattccaaatcctatccattgcctatcaatgcgcttgactatcgattactatcttctgtctccggagaaaagaaaattccctcggagtgaaaacctagaaaaccctaatctttatcattatgccctcttttccgacaatgtattagctgcatcagtagttgttaactcaaccatcatgaatgccaaggtaaaatcattagctcttatcacttgattcgtcctaatatctgtatgtttaattttagatacgcattgcagagctgaaattaaaaatgtctttattccctatatgtgcaggatccttctaagcatgtttttcaccttgtcacggataaactcaatttcggagcaatgaacatgtggttcctcctaaacccacccggaaaggcaaccatacatgtggaaaacgtcgatgagtttaagtggctcaattcatcttactgtcctgtccttcgtcagcttgaatctgcagcaatgagagagtactattttaaagcagaccatccaacttcaggctcttcgaatctaaaatacagaaacccaaagtatctatccatgttgaatcacttgagattctacctccctgaggtttatcccaagctgaacaaaatcctcttcctggacgatgacatcattgttcagaaagacttgactccactctgggaagttaacctgaacggcaaagtcaacggtgcagtcgaaacctgtggggaaagtttccacagattcgacaagtatctcaacttttcgaatcctcacattgcgaggaacttcaatccaaatgcttgtggatgggcttatggaatgaacatgttcgacctaaaggaatggaagaagagagacatcactggtatataccacaagtggcaaaacatggtaaataactctttaattctttgcaacaaatagtctaatgatggtttattattttatttattgtggtttgctcattttggcttgtgttgtttagaatgagaacaggacactatggaagctagggacattgccaccaggattaataacattctacggattaacacatcccttaaacaaggcgtggcatgtgctgggacttggatataacccgagtatcgacaagaaggacattgagaatgcagcagtggttcactataacgggaacatgaaaccatggttggagttggcaatgtccaaatatcggccgtattggaccaagtacatcaagtttgatcacccatatcttcgtcgttgcaaccttcatgaataaaatcaaatctttgttagatgatttgaggtaattacttctaatgttctgttgttcccattccattgctctttattccacacattgttaattgtttattcatatcgttttttagtcattcttttcttctcttcttctttcgggttaaaaacacttatgttattttttgagtttttctaatgatagtaatatgtttctggagattctcttgatggtcttgtgaaaaaattgaagaacacatactatctctctatttactatatactgtaagtcaaaataataatccaattttttgttgatgtgtcattaataaataaataactatcattaataattggattggttacacattttaaattttatttatgtttggatatccaatttttttttttccattgctaatttaattgttatcattatgatgttcatattcttttcttgtattggatcatattgtatatctttattttccaattgtaaatattcaaaataatatattttcttggaaaaaaatctattgtggtttctctttttttatataagcaactatttaatggtaatatgacatataataataatttaaaaaattagatagtatttagattttagactattagtggaaaattttacaaaataaataaatcccaactatgatagaaacccaaattgagtgaaaatagaagatgggctttaaatcggaccgacgcttattgcttactaatacaaatcgcccttccttaaggtctgaagacgaaacgaagaacaaacactgaaacaaaagagaaaaatcccaaagctagaaaccctaatcccaaacgaatcaatggagcgagacgaagaagcgagtggaccgatgatggagatgtgcactaacggcggcgaagagacgtctaatcgaagacctatcataagtggcgaaccgctcgacatcgaggcctacgcggctctctacaaaggtcgcacgaagatcatgcggcttctcttcatcgctaaccactgcggaggaaaccacgcgcttcagtttgacgcgttgaggatggcttacgatgagatcaaaaagggtgagaatacgcagttgttcagagaagtggtcaataagattggcaacaggcttggggaaaagtatgggatggatcttgcttggtgtgaggccgtcgatcgtcgtgctgaacagaagaaagtaaagctggagaatgagctcagttcttatcgggtaattacatttttgacctaattttcattatctctattccttgcttattgactctctactaggatttggtgatgctttttctcaagtaggttcttagagaatcaagtatgtagtgttgtttgtgttacttactgtgcgtatagctcgttacactggcttgcttgattctgtaattgcattaatgttgatttatctccttgatatgagtatacagccaaatctgctctattgactctttactgctgattttgatgatgttctttctcaattaattgcttaaagagtgaagtatgtggtgctgtttatgtgttgctcagtgtgtgcttagctcttttctagtttatcacttgcttgaataattgcatcattgttgatgcatcttcttggtatgagtatacgaccaaatctgatcaaggaaagcatcataattggctctcatggttagctgtataatgttaactctctgtttaataattaatttcttagagactgaagtatgtgctgttctttttgtgttgttcagcgtgtgcattatgcatagctctttcatggtaatagcttgcttgattcttaaattgcattaatgttgattcttcttcttgatatgtgtattgatatgtgtatacagacaaatttgatcaaggaaagcatcagaatgggttacaatgactttggagatttctattacgcatgtggtatgctcggagatgctttcaagaactatatccgaacacgcgactactgcactacgacaaagcacatcattcacatgtgtatgaatgcgattcttgtcagcatcgaaatgggtcagtttactcatgttacaagctatgtgaacaaggcagagcagaatcctgaaacccttgaacctatggttaatgcaaaactgcgatgtgcatctggattggctcatttggagttgaagaagtacaagctagctgctcgtaaggtctgttgttttcccatatttgctcatgtgtttatggatcctattcatatcctaactgaaatctaatcattgaacttgaatattgtcttgtgcagttcttagatgttaacccagaacttggaaattcctataatgaagtcattgctcctcaagatattgccacctatggtggactctgtgccctggcaagctttgatcgatcagaattgaaggcatgtatcctatttagcatttcttttaactctgccatttttctccaacacttggtctataacttagtctaattttgcagcaaaaagtcattgacaatatcaacttccggaatttcttggagctagtgcctgatgtgagggaacttatcaacgatttctattcaaggttgcatattcttaccaagactctcgtctatttcttgcatagcaccaaattactaaccttgaactaaggattattagtgtgaatacccactaagaccagatttacccaacgaagtccctcataattattatgtcccttgaatccactatttattctaatcactgactctgataaactgaagtagctgttgtgacgttagactctaatcctgtatcgattatgaaggcttccaatgttgccctccaaattcttatctatgttaacaatgcgtaagacatgcaaactcgacccttttagactgtattctcgttgaatctaattattaagtttgcttgttgcagccgctatgcttcctgcctggaatatcttgcaagtctcaaatcgaatctgctgctggacatccatcttcatgatcacgttgacacactatatgatcagataaggaagaaggcactgatccagtacacattgccatttgtctctgttgatttgagcaggatggccgatgcattcaagactagcgtctctggtctagagaaagaacttgaagccttgatcacagacaaccagattcaggtccgtagtgtttcccgaaataactttgttttatgttactgtcattttaaaaaccttaatagaggcaaaatcttttttccatcccggacaggcaaggattgattcacacaacaaaatcctctatgcaagacacgcggatcagaggaatgcaactttccaaaaggtacttcagatgggaaacgaattcgatagagatgtcagggcgatgctgttaagagccaacctcctgaaacatgagtatcatgccagatcggcaaggaaactttgatgacatctgctttgctaaactgagaggtaatggcctattccaagatcataagatatctgttaaaatttaatttggtttagttactggttagctttctatctgaccttctctgttctctagttatcgctttgttttgtcaacttttagtttaagattctttgaattatctatggactttgaatgaaatcccgagtgtgaatctatagacgcatgaatcacactgaaagtgaaatggtcaaagagtacagacataagtacacacacttggtttcatgggccgatatgatttatgatctttgtatgcatgtgggtggtgggatcaaaaatctcatctcccaactaatatccatttcattttgtcaactaaacgtcgtatattatatgatagtttgtggctttgtgcacagttgtcactctatagttgaagacttttttttttcttatctacaagaaataataatcaaaacggttaggtcttttttttataagtagaatctcgaaaattgcaaaaccaagatttgatgtcggcaaacgcatcatgtagactaagtgtgaacttttgattttcttgtgtcaaagaacttttgatattaatcactcgatagctacgtttcatcattattagtttcttctatagaatttttatcactgaatgggatagttcacattatctggtactattatttttactattgcaagtagttcttttctatgcatttctttgaagttgttctctttgtagtttgaggtatcttatatatatatatttctatatgtttgtgtttgccaggaatattcaagggtgttttttcaagattcgaaccaaacgagaaattgggcaagattacttttttgtaagaaccaagtgtttcaatgagtcgatgacatttagagtaagtaaaggttttattctaagatggacagtccattattaatcaactattgaatgatattgccttttaaatgagtcttaggtagcatcgcaataactccatgtttactcaaaactcacaaaccatgaagttaagaatccgccaaatttggaagatgggccaactctaaatttactcaccccaatactccatttattttgggttgcattgatgaaagtaatttgtataattgataggttgtgtatcaaaaaccggatctcattatttgtgatctttgcattagttatttttggagactaataaccatctttctaaactgtgagtaatacaaatataaacaacttcttgttcgctatggaaaataaaacataactctttaggtacgattcacgatgcaaaaacaatagtcatcgtgaataaacatgtccgaaatacatgaattaacaaatgaaacgctcaacaaatgaattgacaaatgaaacgctcaacaaacgaagaatctcacatcccatgatgaaattgggatttacaaataaaaagtagcacaagaagaagggggtagaacagtaattttaaaagaaagacagcgttgattcaccacttgaagtggacttttatagcaaaaagagttgagtaacgtcaaaagagtcaaacccaacttttcaaaggttgtgtaaggctttccatgactccacatcttcttcttttccctttttatccttttctcttctctctcttttattttttcttttgaagtaaattaatttcacgaaacaaatcagagaaccttttatatcttcctttttcgtcgttactatcgtcctttacctttttcatttactgttctctctctctctctatctctatctctatcttctattcatggacatgcaccgaagcgacaaagcttagggcttttctctcatccatggcggatttcttctatcttcattaaatatttccctctttattaaaatctcatgaatttcaacggttttctcgacgacggtgctggagcctcaaagctactctctgatgctccgtacaacaaccacttctctttctccgccgtagacaccatgctcggaagcgccgccattgctccttctcagtctcttcctttctcttcttcaggcctctctctcggactcgtaagctcactatctcctcttttaatcttcgatttcttcttcttctactacttatgataatctctgtaaatttggcagcaaacaaatggagaaatgagtagaaacggagagattatggagtcaaacgtaagtcgtaagagtagtagaggagaagatgtagaaagcagatctgaaagtgataacgctgaagctgtctccggtgacgatttagatacctccgatagacctttaaagaagaagaaacgttaccatcgtcacactcctaaacaaattcaagacctcgaatcgtaaactcactatacacaaaatctccatttacacttctacgaatcgttttgatttttgattttgatgaatcctccatttttagggtttttaaagagtgtgcacatccagacgagaagcaacgtcttgatcttagccgtcgacttaacttagatcctcgtcaagtcaagttctggttccagaatcgtcgtactcagatgaaggtttttagcttcgaatcgctaatctttgttttctggtttctttgttttgatttttgatttgtttttacagactcaaatcgaacgacatgagaatgctttgttgaggcaagagaacgataagcttcgagctgagaatatgtctgtacgcgaagctatgagaaaccctatgtgtggtaattgcggcggacctgccgttatcggtgagatctcaatggaagagcaacatctgagaattgaaaactctcgtctcaaagatgagttagaccgagtctgtgccttaaccggtaagtttcttggccggtctaatggttcacatcatataccggactcagcacttgttctcggcgttggtgttggttctggtggatgtaatgttggtggtggtttcactctctcttctccgctgttgcctcaagcttctcctagatttgagatttctaatggaaccggttctggtttggtggctacggttaaccgtcaacaaccggttagtgttagtgattttgatcagagatcgaggtatttggatttagctcttgcggctatggatgagcttgtgaagatggctcagacacgtgagccgctctgggttcgaagctcggattctggttttgaagtgctgaaccaggaagagtacgacacaagtttctctcggtgtgttggaccaaaacaagatgggtttgtctcagaagcttctaaagaagctggaactgttatcatcaatagcttagcgctcgttgaaaccttaatggactcggtgagtagttactaaaacacttaattttagtaatgagcttaatccagcaaaagttctagaaagtactaatcttttgatacaatgttttttataggaacggtgggcggaaatgtttcctagtatggtctcaagaacttcaaccacagagattatctctagtggcatgggagggcgaaatggtgcacttcacctggtatgtaattatgcgtttaacatttaattaacacatataaaatcttaattcaacaaatgggtcttttaatgttttgtttttggttaattagatgcacgcagagcttcaactgctgtctccactcgtgccggttagacaagtgtcgttcttgcggttctgtaaacagcacgcggaaggtgtttgggcagtcgtggatgtctcaattgattccattagagaaggttcttcttcgagctgtagaagattaccatccggttgcctcgtacaagacatggccaatggctactcaaaggtaaaattattctttctgggtgatgattatttgtaatagtagtatactgtatagttttaacttttcacctttaggagttaccctagtgttggttggttcacatttctctaggaaccacaggcaagctctttgtttttgtccgagaaattatgataaaggtttcttatgcattgggtttataactttaaattaacttatgcattggagtaggattattttattgatcagaagcatctaaatatctccgagttctgtgcccttggatcgtgcattaatttttatcattacacgttcatagaagtttttctctttgattatcattaattatgtgttaaagctgacattagacctaaaaaaacgattgtgataaacctaacgcaaaatagtttaagaaatttgcaggtaacatggatcgagcacacggagtatgacgaaaaccacatccaccgtttataccgcccattactcaggtgcggtctagcgtttggtgcgcatcgatggatggctgcattacaacgtcaatgcgaatgcctcacgattctcatgtcctccactgtttccacttccactaatccatcccgtaagctccctcaaacgctgcgtttctgatttattttgtagaaatatatatttgtttgttgttgttgacgtgattcatatcttatcctaccagaataaataagatttaataaatagtatgaactgttgactgagtcacaaagaaaaagatgatagctgttgattctgtaattatcaaactatatagtttaattaatctttttttggttatattaatgggcacagctataaactgcaatgggagaaaaagcatgctaaagctagcgaagaggatgactgataatttctgtggaggggtttgtgcttcgtcgttacagaaatggagcaaactcaacgttggcaacgtcgacgaagacgttaggataatgactaggaagagtgtaaacaatcctggcgagccgcctgggataattctaaatgcggcgacgtcagtttggatgccggtatctccgaggcggttgtttgacttccttggaaacgaacggcttagatcggaatgggatatcttatccaacggtggaccaatgaaagagatggcccatatagctaaaggccatgaccgttccaactccgtctccctcctccgtgccagcgtaagcattcatatttattacactttctatttgcatgcgtaagtagctaagctaatctccaaattttagtttaggttttggtgaatttagtattttataaacattagatggttttggaaaacttgaaattttagtcggtttagttttttgtttacggttttcaactttttctgatttttttgggttggttttagataaattaaagttaaaccgacttgtgtggacattgaatatttgatctataaacagtgtatgaaaggactttgttgtgttgtgtgaccccaggatggtgttgtcatatgaatcttgtcgcgtgtgattggaaagtgacaaatctagaatttggaagtattgtgtgataaaagtcaatagtaataagacatttttgacctttttctttcctttttggctccgacgttttgaaaaatcctctgtttttttctctctttatttctgcattattggtgtcttttctccgttgtaccccttgagctttttctggcttgtgacggtgacactgtaaaagtctcctcgttcatcatcttttaatttattgtttccccttttgggatttataattttctcttctaccaccaaagtttccatttatttaattttgttttgattttttcatgcaggcgataaatgcgaatcagagtagtatgctgatattacaagagacaagcatagacgctgcaggagcggttgtcgtgtacgcgcctgttgatatcccagcaatgcaagctgtgatgaacggtggagattctgcttacgtggcactccttccttcaggattcgccattctccctaacggtcaggctggtacgcaacgctgcgccgcagaggaacgtaacagtattggtaacggtgggtgcatggaggaaggagggtcgttactaacggtggcgtttcagatactggtgaatagtttgcctacggctaagctaacggtggaatctgtggagacggttaataatttgatatcgtgcaccgttcagaagattaaagctgctcttcattgtgatagcacctgatcatcgagatcagacgatggaggagattgagtcaagaacgaacctcattttgtgatgaatccgtttttgtgatggttcgggtattgactcgatgaaatttaaaaaaaaaaaaaaaacaaagaatgttgtaatttggatcggttttattttggatcatgtcgatgaaatgtaattgtttcttgtttctcttcttgtaatgactcgataatatcgggacagcattatatgaaacacacaagttttttttaggggagctcaaataattagttataagcaaaaacgtattatcatttttttggttataaatcaaggcaaccagaagcacaatccgtgtttacttttgtggtagtttataatgtgaaaggattggtttggaccgtgtcctttatttaatgttgttccaagtttacagtacttttctcaataagatggaaaaggaacgaacgaagaagagtgaaacacgtgagtgcatgaatttagttgcaatcccttatagttattatatccatgcaatgtagacaactacaacgaaaggctaattgattaggttggtttagagattgtttgataatgctagcctagatccaaaggtcacatcagaagagaccacaggctactaatgggcttttatctaaagcctgtcattaactactctattatggctaccaagtaagtcttctcaaagtgtattgggccaatcattaactaatttattgggctagattttaagtccattggagtatatactattattacaaacgacaataatattattattacaaacgggccgaaagaaaagagtcaaaaggaagagtcaaacttccgaataatccgcgcgcttaacgttcgatcgccaccgttgaatgaacaaacggtcacgatcgtatctaatacagattatttaattccatttttttcttgtggggtgatgatctctgaacagaaattaagggtatgagaatgattgattggtcttggaattgtgtaatagaccaatggcgagaaatgccatctgttcttttttagtttaagctatatccgctccgccgcagagatatatatagatatttctataaatatgtttttgtatatatacacagagagttttgattaaggaagaaaaatccttagatcattttttttttgttatctttgtttcgtttttctggtagaagagagaagaaggagagacgaattggcagctaagcgattctctctctttctctctttctcttctcgtgtaatcttttggtgttcttgaaaccacttttttttttgttaattcctctgtttccttggaattgttttctgcttttttaagaagaaaaaaacgatgaatgtggtgcggagattaacgagtattgcctctggacgtaatttcgtttcttctgataacgtaaagaatattgaaactttttgagttttttttgtttgtttgtatttattttcttgatttggggattgtttaaagttggactcttttgtttttgtaacttgcgtaggtaggagaaactgagacgccgagatcaaagcctaaccagaatcgtgaagaaacagagtctacggaaactacgtcgtacgagaaagattctgtctcttcctcagagaactctgatcatttaccaaaggaaatccgtgaggtgggacttggagatgacaaggtttccatttttgagatttttttagccttttgagtttctgatttgctttgtttctctgatctttgagctaatggttcaaatggatttgataggatatggactgtggaatcatcaagggaaatggaacagaatctggacggattattaccaccaaaaagaagggtttgaatgatcaaaaagacaaggtgacttttcagttttggcttgtgttctttgtaatgacacatttctaaaattgttctccatgaaaatctgtttttttatatattgtttgttattatgcagacaatctcttacagagctgaacatgtaattggcactggctcattcggtgttgtctttcaggtaaataaaatttagactcgagatattttatttagttgttttaaaaatttgattttgaagttgattcctggttttgatgtaggctaagtgcttagagacggaagaaaaagtagcaataaagaaagtgttacaggacaagagatacaaaaacagagaacttcagatcatgcgaatgcttgatcatcctaatgtcgttgagctcaagcattctttcttttccacgactgagaaagacgagctttatcttaaccttgttcttgagtatgtacccgagactatttaccgcgcttccagatcttacaccaagatgaatcagcatatgcctttgatttatattcagctctacacctatcaggtattaagaccgtgtactcttttctgcattcagctctatttttgacttttggggttctgagaaacatttgtttgttgaaaccagatttgccgtgctatgaattatctgcatcaagtggttggagtgtgtcaccgtgacattaagccgcagaatctgttggtaagcacagcattttaagactagttcttgtaaagctagtactacttttcttactcaatttgagaaatgttgatgcattttgcaggtcaataatgttacgcatgaagtaaagatatgcgattttgggagcgccaaaatgctggtatgtttcatagctcttaatgggattttcaggggttgtttgttatatatgaaaacaatgagtagtgatgtcttgttggtttcagattccaggagaaccaaatatatcttacatatgctcaaggtattacagagctcctgaactcatatttggagcaaccgaatacacaagtgcgatcgatatgtggtctgtaggttgtgtcatggctgagctttttcttggacatgtaagaaaaaagtatctggttctgagttttttcaacttttgatttgagacatttgctttgaacctctctcttttgctttaaatgtctacagcctctattccctggagaaaccagtgttgatcaattggtggagatcattaaggtaacaacatattggtttttttattacttttatctgttgtttttttgggggggctcagattcttagagttgttgtataaacagattttagggacaccagcaagagaagagataaagaacatgaatcctcgttacaatgattttaagttccctcagatcaaagctcagccgtggcacaaggtttatacataacaaatttaaccaagtgatttacaaattttgataatatgttgcttacaaatgaatctgcaacttttcacactcaaaatcttccgatgatttttcagattttccggagacaggtatctccagaagcaatggatcttgcctctagattgctccagtattcaccaaacctgagatgcacagcggtaagagaaaaaaaaaacagttgatttctgactattaaaattgctgcttcaattcctttaatttgactctgctttcagcttgaagcatgtgcacacccattcttcgatgatctgagagacccgagagcatccttgcctaatggaagagcacttcctccattgtttgatttcacagctcaaggttttggcaactacactttgcttcttttataacttacctcccaaccggaaaatgcttatctttctcttcttgcagaacttgctggggcatctgttgaactgcgtcatcgcttaatacctgagcatgcaaggaaatgaccatttgggttaatggctgcttctctacgcagatgttgatatataaatctttttttattttgagagtttcttgttcacaagtatagcattgtgctggttatgaaccctcactgacctctgcaaccacatcgactagcagtttgaaagtgtataattgtaagtttgtaactttgtagctttcattgttgcagacagaaatgcagaattttccgagttttccttctattgcaaatgttaccaatagtctccgcaagaacactttccatctctaaagtgatgaaagcagttagaatctcttaagatgatatgccgaagatatactcttgatatatacttcattgcactgtggcaatccccacagacgcgaaggttcttgatgatccggattggagctccagatggtacaacaagtagaccaaacgcaacagctaatttctcactatggtaagccaaacctagctccttcccttccttatctaagtcatggagagcaaaactcatatccgcgaaataaccagcctctttgatcaaaagcatcatttcatcaaccttggaatatatctcaaccattctcggatgtcttctatcttcagacataaagctatgaactttacctttctcttcaacccaactgcaaccaggttctttgcttatattacgagatttcatcaatctacgaacatttgcagcttcgtcttgtcttcccgctgcagaatacatgtttgataactgaacataaggaacagcattgtttggttccaattccataagagttttcgctgctctttccccgttttctatattcccatgcttcctacttgcagccaaaatcgctttccatacagtagcatctggttcaacctccatttgatgcagcaattgctctacttttacgaaatcaccagatctaccaaagagatcaatcatacaggcatagtgttccggtcctggtgtgattccataaactgttctcatcgaatcaaagtagcgttgagcatcttctaagagacctgcatgactgcaagcaaatagtaacccgataaaggtaatgtaatctgggtgttatgccactgcctatcatcaaatcgtatgactgtagtgagtccttggctctaccgttttttgcgtaacccacaataagacaagtccatgttattaaatccctgatttccatagagttgaatataacattcgcgtcttctaagcttccacactttgtgtacattgtcacaagagaattgtttactgacaaagatgaaggaaaaccagatttaatataattcccatgtacctgttgcccaaactccaaaagagttaactccgccgaggcgcttaatacactcgctgtaacaatcttatcaggagtaatgcctccaactctcatgttacagaacaacttcagtgcttcatcataagatccgttatgtgtatttcctgtcacaagagctgtccaagatatcacatctttctcaatcatcccttcaaacactttcaacgctgaatccatgatccctcttttagcatacatatccacaagggcgttattcacaagtttgtaagtcgcatacccggttttcacaatcagacaatgtgcagaagaagctatcttcatttctgtcctagacaaagcaaaacaatttaagatggatgggatcgtgaaatcatctattttcatatctcgctcatgcattcttccaaacatagacagagcttctccaataagaccttgtctaacacaccctacaatcatcgagttccaagataccacatcatcaacctccataccttctaacaaagctcttgcggattccatttctctgcatttagcatacatatcaatcaatgcgctctgaacatagatattggtcttgaaaccactcttaactatgcagcaatgtacctggactcctaccctgcaagcagaaaccgaggcacaagcagttaaaacactaggaaatgtatattgattcgattgatttccttctcttctcaaatccctaaaacactctattgccttgaaagcaaatccattttgagagtaaccagtgagcattgaagtccatgtaacattatttttctcaccttccattgtctcaaagaggtattcagcttcagagatacgcttgcattgtgcatacatagcaagaaggccattcaccacattaacatccaaatcaaacccggtttttattgtatgcccatgaatctgttcacctctcagaagcaaaacaagcgaagtacacatcctaagaacactacccaaagtgtactcgttaggttttattccatcagactgcatttcccaaaacaaattaaaagcttcaactttacttccagacttgcaatacccagagataagagcattccaggagattgtattcttcactgggttgctacgaaaaagcttttctgcatcagaaagtcgccttgaattcgagtaagcaacgatcatcgtgttccatgtaaactcatccctctcaggcattttatcgaacatttggcgggcttcatcgacccgaccagatttagacaaatctcccaaaagcagattcgagtgaagcttcgttctatcagcatagctgtgaatacaactaccaaacggtttcaaaggaaggcgccattttctgtagttcaatctgtgcattacgacagagccaaattatatatactctctctttcactttcacaagacaacaaaataaaacacttgttaaggtttacggatacaagacaaataccaaatttcgaatatgccattgccacggccggcccacagttttgtacaacattaaaataacaaaagtaaattatttaacattagattaagttgattaaaaaaaagtgtgattatatcattaaatctattgcttgctagtaattggtgatatttggatgagtgtcaataaaaaaaaaaaagtaaaaaccttaagactttaatttgattttttttttttgttggatgtattgaatttggagtgatgcatttttcaaagtaaaataacaaacaaacaatagtttctggaaatcgatggacatttaacatgcaattttttacatgcatgtaattaagattagaaaagattgcaagaaacttttgctattttattttattatttattgttgatgatcgtttatatagtagataagaacaaagcaaaacaaaaaaatcatcaagttctgcaaagataattgcagaggcaaataaatcttttgtcaacggttttatagcactggccagttccttgcaactgcttgtcacagagacttgtgcatgtggctccatcacaattgttgtttaacagaatctgatgacatatatgttgtccttgcgtttctttcgccatcatccctaaaacaatatttttaaacatcaaatttcaatatacaaagcataaaaacgtgaaaatttatttgattaatttgttaatggtcatttataatatagttagagaatggaaatgtaaaacaaacctaggaagaagacaatgaagatgacaacattggtgagtttactcatctttttgatgatataataggatttggttggaaaaagaaaaggatttgaagttcttttaatatcttaaacaaaatgagggtatttgtaatatatgtgacatgtaaatatcatctctatatatatactgtatgtgtgaagttgtgtgtctacgtgtctaatatagcaaaaaaagttggacgcatttgatttggaaagcaatcaagtatgataattagaaagaaaataaaaatcaaataaactatacattcataagatggacaagtaaagagaaaatgaatgggaactatggcagtaagtgttttagaaagcaatctgttcaaatataaatagaattgaattcaaaaaccacttttagaatgaaataaacttttgattcaaatgccatctactgtagttcaacaataagatatgatagaaaaccttttttcttttaactcgattttccgtatctgacccaacatcaaaaccattggatttgatttagttaatgaatatgtatatatttttaatataagataaggaataactaagattattcattccgctttcattcatatgtttttaagatttttgtttcaaatttacgaatgttttagttttgtaaaataattgttatatccatgatccatgatccatgatccatccctgtgaggcacatatgctcaagtagtagcttatagttcatgtgaaataagaaaatgaaatcagaatttatataataatataagacattgtgtaagtttagttttaattcatgtcattgtcattatcattatcattatcattatcattatcattatcattatcattattattagttttattatcataattttattactattttaaattagaatttgagtctataaaagttaagttttgcaaggaaatgtgcagagacaactttttctataagtataaacgtttgggaagcacgatccatttcctttccatttttgcttacacagagtatcacaagtgccttcatcacagttcttagctttcattaaaatatcacgacacatttcttgtccttgcgtctctttcgttaccttccctaacaaatattttaaataatctttaaaaaaaaatttataaaaccaaaaaaaatgtattaaatgttttaaagaatggtaaatgtaaggcaaacctagaacgaggacgatcatgaaaatagcgagaatggtggatttagacatctttgattaaaatttcagagtaaaaaaacagaaatgctgatgataatatatatgtgaatattatatatatatatatatataagtaattaaatatatatatatatatatatagtatgatacatgaagaaaaaaaaataaaaaatagacaaattcaataaataaatagttatatagatgatgggaatggaaacaaaatcataaaatatataaacataggaaggatatttacaaaaatcaataaaaattaaataaaataagagagctttatatatatataatttaaattttgtaatatattgaatggtccaaattgcattctcattgatatttatctataaaaaaaggatttgaagttcttttaatatcttaaaccaaatgagggtttttgtaatatatgtgacttgtaaatatcatctttatatatatgtgtgaagttgtgtgtctacgtgtctaatatacaatcaatcctaatagaaaaaaaagttggacgcatttgatttggaaagcattcaagtatattaattagaaagaaaataaaaatccaaataaactgtatattcataagatggacaagtcaagagatagtgagaatggaagtaagtgttttagaaagtaatctgttcaaatataaatagaattgaattcaaataacacttttagaatgagataaacttttgatttaaatgccatctaattcaacaataagatatgaaagaaaacctcttttttgtaactagatttcctgtttcttgcccaacatcaaaaccattggatttgattttgttttttttttggtaggtcagattttatttagttaatgaatatgtatatgtttttaatttagataaggaataactaagattattcattccgctttcattcatgtgtttttaagacttttgtttcaaatataccaatgttttaattttgtaaaataattgttatatccatgatccatccctgtgaagctcatatgctcaagtagtagcttatagttcatgtgaaataagaaaatgaaatcagaatttatataataatataagacattgtgtaagtttaattttatttcatgtcattatcattgtgacattgtcattatcattagttttattatcattattttattactattataaattacaatttgactttgtaagagttcaagttttgcaaggaaatgtgcagaggcagctttttctatatacgtttgggaagcacgatccatttcctttccatttttgcttacacagagtagcacaagtgctatcgtcacagtttttagctctcattaaaagatcacgacacatttcttgtcctttcgtctctttcgttaccatccctaacaaatattaaaacataagctttaaacacaatcttcatagaaccaaaaagatgtattaaatgttttaaagaatggtatatgtaacgcaaacctagaacgaagacgatcatgaaaatagcgaatatggtggatttagccatctttgataaaaattttagagtaaaaaaccagaaatgttgatgataatatagatgtgaatatcattatatatatataaaagaaattaaatatatacatatagtatgtacatgaataaaaaaaagtagacaaaatcaataaataaatagttatttagatggtgggaatggaaacaaaatcataaaatatataaacataggaaggatatttacaaaatcaattaaaataaaattaaataagagagcttctcttatatatacaactaataattttaaaatttgtaatacattgaatggtccaaggtgcattctcatagatttttatctataaaatatatgtaaataaaatccagttaattatcttacaattctgattttcatgtacaataagttggattaatctttaaaaaataagttgtaaggatccatcaaataatccccttctaactataatacgcatatttggagtttaaactctcaaaatttagatattgaattgagccttaaacctcgaaaataaagtatgtctactacaatgatataatttagatataaacttaacataacacaaattgtgggggtacaaaaaatgttagcaaaaatataaaaagtccttttggaaaataaaaagatttgagcaactacattaagtttatgtatttttttagaatttcccggaagaataaaactactgtagtctcatgatatcaaaacgtttattggggacaagacattctcttgtcgttttgtcaattatccattagatagaaactggtcctcgaaacctagaatcatccaccccgcaaagtcgacagatttccagcgaattcaaacccgatccatcgagattctggatcaacccgattacccaagatccaatctttctaattgatgaatcaatcgatcccttctaccgtatcttcttctccgacgactgatacgatggacgcttcgccgcttcttggccggaacagacgtaaccgcccacggtcctctcagccgattcgtggcgcggcgtcgagacttctccgccgtgctagcaaccgccggatgatgctccgtgagccctccgttcgagtccgtgaggtggcggctgagcagcttgaggaacggcagagtcaatgggcttactctaaacccattatagttctcgatatactttggaatttcctatttgtgattgtttcaatcgcgattctagggtttagttctgatgaagatcctgatgttcctcttaggttgtggatcattgggtataatgttcagtgtttgtttcatgttggatgtgtcattgctgagtataaacgtcgccgtgttgctaattctcctcctcctagtggtgaagattcctccaatcacgagtctcttagcggaagtgaagatgaatctgatggctatagcattaacaacactgatgatgatgaccatggaactaggttcaatttctttcttatggctacagcattatactagcttagattcagagcaatgttggttcttgtgatagacttatactagcttagaattcagagccatgttaggttgaaggaaacttttaggattgtatagaaataaagaactgaatgagaactgtttcccattgatctactctcatgtggtttgtttcctattctagtttcactaagcaccttgaatctgcgaataccatgttctcttttgtgtggtggatcatcgggttttactgggtgacggctgataccgaggcactagctcaatcttcgccacaactctactggtttgtttctaacaaaagttggctgttgtgattttgtattctcaagagtttgtttctgtgatttatttaatctttgtttcttgtgtgttttgcaggctctgtgttgcattccttgcgtttgatgttatgtttgttgtcatttgcgtagcggttgctagtcttattggtattgctgtttgttgctgtttaccttgcatcattgcgatcttgtacgcattagcagatcaggtaaagaaacattatgatgatgaagaacaaatgagtctcatgtttcttggtgaatcctattaagcgatttgtaaatttcaggaaggtgcaccggatgaagagatagagaggcttttaaaattcaagtttctcacagtaaagaattctgagaaagtgaatggcgaaatacgggaaactcaaggagggataatgactggattagataccgagtctcaaaccgaacgtatgttattaagcgaagatgctgtaagtaaccataatcaaatctcccattttctatcgaatttggataaagacactgaactgactttagcaaaaccggaaaaaaaaaaccattgcaggaatgcagcatttgtctatgtgcttatgaagatggagtagaactaagggagcttccttgtagacaccattttcacagtttatgtgtagacaaatggctaaggatcaacgctacttgccctctctgcaaattcaatatcctcaaaaatggtgaacctagtggcagtgaacaagtgtgatgaggagaaagattttgctgttcaatctttgtggaatgtgatgagctcatcatcatcatttacttcaaagcctgtttgttcttttgaccattacagaggaaagaacaagaaagaagaccttgagatttgttttgagatgaagctgcacatcttgtctttttggatatgatatttgtaaatgcaataagtatatatagttcggttggaagatgttattcatcgagtcagttgtgattttagccgtttggtgtttttaagcaacggattaattagattaatgtacggtgatgaaccatgcatgtttatattgctgtgacgtcattgtagtgaggtgaaaaagagagagagagatcactatttaatcagaattcacattcaaaaatatatatataaatcactgcaatcaattgtattctaaaaatttattcaacgtagtaagtcaaagattgatgatatagtttgtggataacagaagacaaatcaactggtgcagtcataagtgcagatgcagaccgtgcttgtagtatcaacacacacgccgtttccaccatgctgcatagtacattcatgtgcgcatatcaaaccttcgcagttttcctgcggtgttaaaagataatcataacactgtttttcttctccttgcgtttcctttgtcaccatccctaatacaaaaaaattaaaacatagtctcagtttccttttgatagaaaaataaaaggtgttgttgaagaaaaactagtatgaataataaagacggaacgtggaaaatattaaaatatgtgttatgtataaagcaaacctaaaacgaggacgaccataaagatagcaagagtgatggctttagtcatttttgataatacaacagaaatgaaattatcaaaaataagatgacaatgagtgtaatgatcatctacacgtgaatgtcatatataagatatcacaaaatctctaaaattagttaaaaatcaacaagtaattaagtagatgttgtattcaaacaaagagaaattaacttaaaagtggaaacgtataaaagtggaaaagagaaagagatcatattacgattatctaccatactaatgtggttattctgtaatcgtaagtagcaacaagagagaagcgtgtggaagtagttaaactgttaaaggcttaaagccaatattgccgctattttaaaagtccgacaaaacttccttgtagacaacatttctacagtttatgtgtagacaaatggctaaggatcaacgcgacttgccctctccaaattccatattctcaaaaatggtgaacatagtggcaatgagcaagtgtgaggaggaggaaatttgtgctctcagtctttgtgaatgtgatgagctcatcattaccttaaaacatgtttataattctttgatcattacagaggaaagaacaaagaaagaggacctggagactgcaatattaatttttccaaacccgttgctttgttattactatttgatgatggtttgatacaaaaaaaaaaacaaattttgatgatgatttatggataacagagacaaatcatgttttgcaaataaacatgcagttgcaggtaaactgatcggttttagaacacccgcctactcccttaaaccttgaagcacacatagcatcacacggcgaagctttacagccttcggttggtgttataagattatgatgacacacactttttctccttctgcttgtgtttccttagtcaccatccctaataataataataaaatatataatttcaaaattttaatataaaataaagaagtgatatcaacacactgaactgtgaacaaatgagaaaaaggtgaaaatacatttaatatgttatatgtataaagcaaacctaaacctagaagaggacgactatgaagatagcaataacgatggttttagtcattttagatgatataatagaaatgaaaaactttaaagtaaaacgataatgtacacccaaatatcatatatatatatatatataatcaatcacaaaatctaaaactagttttttttaatataaatcaactagtaattaagtaggtaaacggaaagagatcttttgaaacaaataagaaaaatatctaaaagaataaaataaaatttgaaacaaataagaacttggttaattatacataatagtctatatgatacatgaataaaacaaaaatgaaaagtcaataaataattaaatagattctcgaaaataaagaaaaaaattataagaacaggaaagagatttagaaacttgatatataaatggaaataaacaaaaacttgataaatcatacctagttttgttatatgcaacatcagatgtgtgagaacactcaaagtagcatataatatatgaattagtccgttaggataatcataatttttgattattaaactatgtatctaagaaaactaaaaatattgggtgtatacagttgtcctcctgacatgagtatatgattgtaagtagggataattaatccgaatactggtttggtttggttcaaaaattttggtttttagtggggcgataaagaggaagagtcatataaagattatctaaaataataatgggttttgtgttgtagtcgtaagccgtaactcgtaagtaacgaacgagagagaaacgtgtggatttagtaaaaggcttgaagccagtggccgctattttaaaagtcggccgaaatcagagactaagcccaattgcgccaacaaacttttaccaaaatggttgaaatttctataatcttgtgaagttgttaattagtaaatcaattcaaacaaaaaatcataaacaagaacagacggtcgtagtgaagccaaaataagtccataacaaagtgcccacgtgaggtacatctaacactgcacattttatatccgtggaagtcttatctcttctctaaccagcagagaaactacttttatctagtcttaaagttgtgcggtataaaattgtcacagcataaacatattacaatttcatttcgatttttttgtaaacatgcccataatctatcatagtgaaacaaatataaatatttcaatttgtctctgttttttttttttttttttacttgaggaaaatccttcttcttttgaaggattaaatatcatagattatatgacgtaactttgacaaaaaaaaaaaaagattatatgacgtaacattctcaaaacaatttaaattgattataaacataccactagatatttgtttaatcatatccgcaacaaatcaccacgcaagtaacgttacaataactcacaatcattaaatacaaaccagaacaattgcaagacttttttttttttgttttcttcttccaacaaacacaccatgcacgaactataacaacaagttcttagatatcatcgtcgaacaaatttgacttttctattttcaattttggtttcgtgagtattataacaaaaattaatcacacatctttgttcctcaattccaaattgggaaaatctatggaacaaagacgaagaattaataatatgtgcatccccccccaaaaaaaaaagattttaaaattggcgttgatacagaccccaaaccggaactccggtaacagtccggccaccgtatccatcaatcgatgccgtctctaatctcggcctccacaaaccagtaaccgccgcttgggacgaacacgcgccgtaatctctggtgggatccgatttaaccaaaatcgaaagattgacgatcccacacttatcaccaaactcatctctcaatctatagctcaagaagtttaagtgaccttcaggtgaataccttcccatgaaatcattcgttgggattttagcttctccgatttttttatcatgcccagaacctgttcgataaaatacctcaatgaagataaactgttcattaccattgatgggcatctctgatttatagttccatgtaggattgcttcttctcgattcgtcaagattagattttcgacatttctcgtcgatttttacgacggcgaaagtctttttcttgatgggtctccggtttagcttaagcccttctgctgatctcaaatcaatctccaatgtttttgtcatcattgttgtataatgattgtcgattgatctaccaaaatatatcatttgggtttaatgtttatttgttggtctaatcattaagtagaatgaaagaacaagtttatatatagacaacatcacttaggaaggtgacaaggaagtttggaaagaagtcgctcggagatttcttctctttttcccgccagctcattatcaagatataaagaagtcgaccaaacaaaaaagggcaaagacaacaaaaaaaaaagacaaggaaattacgtttaaattttagattagtattttgttcatttgaattcggttttatatcaaaaaataaaataaaattgtttgaatatattttatgaaaacaataaaactgttttcaaatgaatcattattttttgttttttgataaataatacttaactctttgctgtgttagttcatatataattttgtgcttcagcttaaatattactccttcattttcttctatttagatgaatgtgtaaattatgaaaaggactataaattataagtggtcataaattctcaaatatatttacatttttaaaaacattttttaatataaaataaactaaattctgagtattttattactagtataataataataaaaaaaaaaatttagttttgtgattatatgacatttcgaatctcgcgaatcacgatgttagtttatttacgtaacatcaatctcaagatttctaattaatataaacacaatttgttttttgaataatgttgtctagttaaaagtgtaatacgacaaaaaggaattaaaacaatgtggcataaccgcataagcgagttgaatccagcagcgtgataaacgcggcgagacgcgagaacgttcgttgttataaaaaaatgcgcgtaccagcagctacgatgaaacacgagtataattgtataaaggaaagtactcgtttatttcttccttaagatctacttaattattcgtttttgaaattgactcttttttatctcaactccagctcaagatttcctaaaatccatgtagttttgtcgtataaaataaaatgtggtaatcatgttctaaataatttactaaaattatgaagtgtccatactcgtatcgtattatggtgtaagttttttttttttgttaagtatgctctatatggccttgatatttagttgtcgacagagtcttaattatatttttagatattaattagaacttacatactcaggataataacatcaaaatactttttcttgatgttaaaaaacttaacttgtgagaaaattatgtggaaaattccttcgcaaaacgtttatttgaacggaaactatagttataacttttcaccaaatattgatcaagaattattcaactcatttgaatatattttcgtacgacctcttagtgtaaatggagttaacttttgtttaagaaggttggaatttacttagacattcaaatacgtagactttatcaaacaatcaaaaatactaattatctaatacgtatagattactttcgtctttttctttttttacgagtggaacgaaaactcatggaaaatattgggggagtcgttgactccatgtcctacttgtacggttgtacacttgtaccattccttaattcttggacaggttgtgcaaaaaaataaacttcaatttaaagtgaagatagtaaaacaaatagtaaagaaatttatggtttcttatgatgattatgtgatcatgtttgcacgtaaggtacaattacaattaagtcttcaccacgtaatatatatgccttaaaaaatataatatctatttttgaaaatatgtaccgcatatatatcatcaaaacatcatttgcagaaagaaaaaaaaaacataactttcgaatttctcatgtattggaaacatctgtttgggttaacctgcagttacgaatttcgttggaaccttttttctcttgttgatttccatgaaacgttgtattttgttttctactcgcattgtatatcttttttcaagtattaaaaaaaaaatttggatgtagagcaaaatacattaactcgacagcttcaattttctaatctttgcgtcaagttttcaaaaagtcttctcataatctgaaaagctaacattttacggccattcgatttggaggaagaacaacttaacgtcccacaacactcgagagccgcaaactgatcatagtcgcatatatacgattctatatatactacatatatttttctatgtggaaatgccccttaattatcattttttaataaaagataaatataatagcccttaatgttcaaaaagctaacttgtaatatcaaaccgatttacattgtgtttttaattaacgtatgggtgtgctatatactagtttgtataaatttgagatagattggccatatgtactataaaagggtaatgatcatattgttataacaggaggagttacgttgtctaatcttatactagcatgccttggatttttcatgcatgcatggatcacaatgtgtgacgtcaccatgtgtttgtcagcacactttgtggaattaaaaccccatctgataattttattatagtgcgatctatcaactatagtacttgcgtgtaaaatattctgacactgaataattatagtgttttttcttggtgaaacaatgatatctgatatataatcgattaatcgcattggtagctaggtttgcaaatttatctatttcttcaaattaagggtctaatttgctaccaaagtaattaaatcggcgtgtatcatatagccatcgaaactgaatcaattcgtatatcaaccataagaagttgttttttcttttcttttcttattagttgtgaagtttggaactgaactctaaatacgtctaaattggttagagactaaaacggataacttagtctcctccgaaataatgtttaaatcacagtgtctggaacttcactagatttataaaaccggaaatattgggtaaaaaaacattgccaagtccattgacttcatctaaagactaaagtcaccgatcgaagccactttcaagtgttcctgacaacgaatttaatagtgtttttacatatgcgacaaagggaaatgataggatatgatgtgtatttccattttgataggatatggtggggattttccattttgattccgatcgagccttagaaaaatattacatacatatatttaaaaaaggcagtggctgggaaacctactacagtattcgataaagacagtgaaatcaagacaaaaacctagctgttacattgagaaattttgaacaatttacatttatgttaaaattatgaactcacccatttgccaacatatgtttccatctaattacctaaagatcggtattaggttttatatataccaagttagctaatatttattatcaaaaaataaaattcttaaaaaatattgttttatggttaatttgctaacatatttgctaaatgctaattatttaacagattatatatgatcagcatatccaccaagaaaaaagattatatgtcagcatcattcttcatgtttaagcgtataatttggcttattccccacaaatgatttcaccggttagagcctataaattagtacatcttattgttacctagtcacttcataatcttatcaaattcgaaataaagttaggtgaatgaatttattagtaattattagacgaaaattgtgccttacgttgcatatatatccggaaagctacactaaaagaagttgacctataaatacctatagcaagtctataaaatctaaatttccacgaacttccacatatctactctatcttatgattctcatttgcatctctgtcagataatgcagagtcatgtgcgtgacatgatactcggtgacctcataacacatcttaccaatctttcattaaatgaaaaaatgattagcggtacttaattttttggtccagagctagtaattgtcattggaaattttgaatgcactgatgcagtgtactgtgtatcccagttgacatttaatggtctataatttggaaaaatggaaagaaacaacagttgcatcgtatcacaggataaacttggacatatcatatgatttagtcaatgatgatcatttttgttattaataggaaaaaaattgttctcttttctttcataaaattttggatattagccttgacatgacatataatttatgtcatgtgatttaatcacaaaacgatcaaaaagtgttatatatcgtctataactcgtacatatattcacactatcgaaattaaacatggatacgactaagacaatacgatggtatacaggtcaaggttgactcttggtttgtttgttttttaacaggtcaagacagcaattatgaggaattcaagatgggcttatgaatttccgagttcattacgatgaaatgaaacagaattatgaatatccgcattctcattattacatgtaaaatttgctaaaaccgaaagacacagagatactttttagggttgttgagagatttctagatgaggtatgttcataagcatcattattttaatgtgatttgtgatgatcagtgctctcaaatcacttttgcatttctccatttacatgagctagctcctacttgtggctttatgtaaatcctggtctacacaagctagagattccattgacgagtaccatggtgatgccttttttcaaagcaggtgttcctgaatgctccttcgttagttccatgcctcatacacgaatggtattcagtgcaggatccaattggacttgattccttgacagactttagcttttctttaaaccaaaaaaagaagaatatctctgctagcttctcatagtctgctcattattgggatgcactatcttcgtagagggaatgtagagttgtacatataaagtggttgacttgggacgaaatacccacattactgtaaaattttaaaaatcgtgctcgaatatcaaatttggtggtcatctcaaaacatcccacaagacaatataaggagtgaaaaaaaatggaacctgtcagaccgccgtgcaaccaccccggcaaggtagaaccgagccgagtaacgatcctctacagcaccagatgcgtcctaagacgatcgtagccgtcaatcacgctctgatcgcacggccatggttcatcaaccagggttaagggcctgtctccttagaaatcaaggaaacagaggtacgagcctatagaacagatcctgttcaagtaaggtcgtgaccaacaatgcttcctcacactttatatacaatcaagtgttttttgtcatattagcgatgtgggataatgtgtaggaacttataagaaaagcgtacatgggtagttgggtactgggtagcagtgataaatgggcaaaagcccacttaattatatcaatagcccaattatcttattgctccatttaagctctctaccacacggtatgggatggcaatatggcatggctttctggttcttacagtttcgtaaacccaatttgagcatgttatcaggaactcaatattaaaagatctacatttgtcagtgaattgggtctctgagcattttcttaaccagaaatcttgcgatgaagtgatgatagacgctagtggaagcaggtgaaaacattttgagcagcagcaagtgaccaataaaagaggacctgtatgtgagattgttgtggcacactaccaatttaaacattgattccttttgtacttctctctcacaggctgtgacacatctgatgcaccaccaccattttactaaatatttgaggcccccaatctaattacagctagcttgatagatgggttgatttcgtgtaagaatcatgcaagttaccattttcaggaaatcttacttggtgtccttgatggaaacaccgagaaacgtgatgaggccttttcctaagcaatatacgcctgaggcctaaacctggttcccggatgctcttccatagatctatactttccaacacaaacggcatccattcatgtatctatgtcaaaccactgcacttgattactttagagacttcagagatctcaccttgtcatactctgctaaatggggatgcaaaattcttcgtaggtggatgataatgtagtagtgttgtataaactgattaaagacagtaatatctgtatacagaatcttgttttattgaacagaagaatgtaaatagatcagcaaaagatcactgagcatgtgaaaaagctttaaagcttagagatgggagaatggtaaaaagtagcacgagataggtaagtgactttcatggtctccttgatcttgaactcaacagtcaccaccgacagattcctcccagtcctcaccaccgttccctccaccaacaattcactctgcaaaataaatctcaaacaatataagcttctgtgctttgaagatcagagagagtcttaagagagacgagaatgaatgttaggtggcttaccgaaataggagcagaagagagataagacatactcaattcaccaatgaacagatgtttgtcttcagacacaacagttttcacacaagccatcgctactctctctgcaattgatgccaccgctcctccatgtaaccccttaaagaaattctgttttcacaacgaaaccaatcaattttacaaatcaaagatcgaaactttacgaaacccatttgatctaattagagagaagaagatgattacggatatgcctggcgtgacggtgacggagcacgagacacggccgcgtgcgatggagagagctctggtattgttttgaaataagacggagaaagagtcgaaagaggtgaaatcgttgcaagattcgtctggggaaatagctttgaagaaatcagcaaccattaatacgtaatttggatcgatcactttggacaccgccgtcgtgtcggacgagatcggagtagaagacatgtcggtgtcttctgggctcccagtttcacggaattttgcccaattcatttttaacctactctgatttttttccaaattgattttttttttgtgtaatgttgacttttctctcttttgtaattatttttttcctatttttagacagtaaaaaactgtaagaacttttttaggtgaagtgtacaaaactatagccacaattttttttatgccgatcaattagtttattcactattttaaatttttgaattagatttattaaatagtgttatttgggtaagtgtaactaatgaaaatcaatttgtgaagaaatttatttcagatatgagcatcttgcttatattaaccttttatttatatataacatctttatatttacagtgctataaatatattaattaatatattaatttatacagaaacgaaagttatacaaagtaatgatccgcatttaaatcaaccaggttgctctcaagacctgttaaacataagttttcaatcctaattcgattgatcattgatgacatgcgtgtatgacatatagttaatatatatctcaaaggggaacatatattaattacctaaagtttccctgcaagcataaatgccttgtagtgaacatccttgacttgttcatcatcaccccaagcttccttaaactcatcaatcatataagaagttaaaagatcctctccttgctcctttgctttcactagaggctgccatgattttaagaaccctagaaatccatctagcgaaagcatgtgtgggatgtcaagagctttaggccttccttgagtccccatcctaatgtttttaaaaggaaactctattgttttataaccatcaaacgccaaattcatagtcgggtttctgtaaggtaatgttgaatccacaagacgtttcatgatggaatcaacctttggggtgatgatgagatcgttgtaaacccaaactacgatgataccgccttgtttacgaagaacacgtttcactatggggtagaatctctttaggtcgaagtagtgaagagcttgagcggctattatgatatctatggagttttctccaccgagtagagtcactagatcgtcgtcggacattgatgatggagtgtgatagtaagtgacttttgggtgcttcattgcacgttggagttgtgattcatttatatcagttgccaccactttctggtagtactcagcgacctaattacacaatatatatttgactcacgtacgattagttcatttaggcttcacataaaaattgatcgtggcttgaagtatttttaaggaaatgtatcaaaacttcaaaaggttcaaagtaacactattgttttagaaagaaaacaaaccccaatagcagcctgaccgttgccggtcccaacatcccaagccaccttatggttgctggttcgaccagccaacactttgtaccatattgtaggatatttcggccttgcgttcaagtactcatcagcttgctttcccgacaaagcagccaattgagccatttttttccttgtgttttttccccctctctttctttgcttttggttgatagattacaatttcacttcataatttaatattacttatagtagtcacgaaaatttggaaaagaaaaaactcgaatctcataccttactcaactagattaggtcttaagtctttatattctttgaagataaggatgctagaaaaagatgatgtcgaatttacagaaatataacgtctaacatcgcatttatgccgcaatccactataaaagaacatgttttattgttattcctcaccgaattgaaggaaataacgattatcgcataggttaactacgttacagatttgtccgtaaataataaactccactaaaatcatacatgaaaaactctacgtactaaataaatacagctttttttgaagtaaatttcagttcagattaacaactggaaaaatcttgaagtaactagaaatcgaatagaataataataaaataaagggaatgtgacactatgaggcacttttaagaaatgtttttccgttttagacacttttaagagtttaggcactttatcttgtttttggtgagaaaatagacaaaattacccttgagattttgtctctctctttttcgtatccattctctctctttctctcgctttatcaaaaataaaaaatcaagaaaacaaatcttcaaaatttacattttttttacgccattaaagagagaaaaaagttgttgaacgtttgcaaagaagaaatcatcaacttctttctttcttccttcttcaacaaatcatcagctttctacaaaaagagagattgattgaacaatcagattcaactttatttttccagttaatcggatctcccgatttctccgtgtctgctttgattaaggagaatttttcagatcaccaacttcagaatatgaatctgatttttataagagaggatctgttggatttaaagaactgccatggtaatatcatcacatattcacatcctcttcgtttttctatcgttttctgtttttgctcttaaataatttatttttcgatttcatgaaccaccaggttgtgaataaaccaaattggccaattccagtattgaattttatatccatttgatcagcttgtttggtatcatatgattttggctcgataaattgataatatcgttgaacttctaagttaagagtattttactttgcatacgagaatcaattatttccacatggtcacgtctaagtggacatgttattatcaaagcttccaacacgatttcattatgtagaaactaataatcatataggtctccaaaacacaagaacaatctgtagacattactttcaaacatcaacacgctaaatccaagtagataatgatagtttgtgtccatgataactcatccacttaaacttgaccatatggagtaatggtgaaacatgacaaacacttgaacacaaatgattcatgtttagagctttcatcaattataatttgaatgaataagagtatcattggtgatgcaagaatcacaacttggtcaaaacaaatcataccaacacacaaaagttcatacatcaatgaatatcaccaatttcacgagtagcgtccattttttgttgaccactagttcacttgtttatagacactctcatcgttatgtgggttgatcacttgtttatagacacatatgctgcaaacaaaatacgtggttgtccattacggattgtccaaatgttgtagtccaatagagaacatcaagtactgaatttcaaacaaacggggcagagaagttatctaacattatcatagaattatgaacaagatcaccaaacacttggaagcttttagtaaaccaaaccattaatctttagttttataggagaaataaccacacaaaaatcaagggatgcacttcactcctccatatcaaacctaaagagataaatgtgtctcaatcaaatactatatatgtgtaaattgacgctaatactctccactagcaaaatcaaagtctgaataaatcgttcaaatcaatctaatttcatcataagagttaaggttagtttataccttcaattccaaacaatttcaattccacaatcaatcaaatccacaatctcacaacaatttttcaaatttctgcaacattgaaacttcctgcatctcgtcacatcaaactttccactataccgattctagaaacttccaataacatcaaaaccagactatgacacctcaaaaacacgaagaatcacgaagcaagacaaaagtaaacatgaatggagatgagtaaactcaaatcaccttgagtttatgaacgacgacgacgtcagaagcgccggtgatgttgatcaagcggtcgataacgttctaactcatgtcgccataagaaagaagatatgaagaatcaatttgagcgagaagcttggttcacaacaattgattgattgtgaaattttgtttttggagtgaggaaggagaaaagaaaaaagattttgttttgttgttgtgaaattaccgtgaaccgatggattgaattgggggagatggattgaattggagggggggaagagagagagagatgaattgtatcgagaaagagagagaattataataagaagaattgttagcgtaaatgtaggagagatatagttaaagggcaaatcgagaattttgtctaacaaaagtgtctcataacttaaaaatgcctaaatcgacaaataactttttaaaagtgtctcacaatataatattctctaaaataaattataataacttgtaagtttgtaattaaccatcgcccaaatatgataactatcatcagtaacgttttgttccaaacaaattgcctttattaacgaaaacaaattgcctttattaacgttttgttccaaacaaatataataactttagttatctcaaatatgtgtcaatataatgcaagaaaaagaaaaaaaaactgtaaattatgaaaatcgacgtcacaggtaaatatactaacatgttcaactttaaataatgcaagactaaaacaacggcgtcggattagaagtctaatctcccatgaacatcaatttctgagctacgtggcttcgtttgcctccacatttcttcgtatggtttctgtgcattcactgcatgcgcataagaaaaaaagaaacgccaattattgatattctttgtctaaaacccagaaataaaaaggttcgaaaatggcagaggaaactccaaggtatgtcttaaatcttctcttagttcttgatttagtctgtaatcttagtgagtttggttctgattttctcagattgtttaatggtttttgtagatatgctgtagttactggagcaaacagagggattggatttgagatatgcagacaattagctagtgaagggattagagttgttttgacctctagagacgaaaacagaggacttgaagctgttgagacactgaagaaagagcttgagatttctgatcaaagccttctttttcatcagcttgatgtcgctgatcctgctagtatcacatctcttgctgagtttgtgaaaacccaatttgggaaactcgatatcttggtaggcattattagtaaactctctttgatcagtttactctgaaacaggtcttagactttacagtttcaaacgtggttttgactagaatgattgctttacaggtcaataatgcagggattggtggtataatcactgatgctgaagctttaagagctggggcagggaaagtatgagataatctttgtgattattttgcaagcaattactttcatgatattattagtattgatgatcttctgtgaagtatttaaatgttttcttgttatattcgacatggcaggaaggtttcaagtgggatgaaatcatcacggagacttatgagttaactgaagaatgcatcaagataaactactatggaccaaagagaatgtgtgaggcgtttattcctcttttgaagttatctgattcaccaagaatcgtcaatgtatcatcctccatgggtcaactaaaggtaagtaagaaaagattagatatcaaggaagcttgagagatgtattgttggctaagaaacactatttatgttacaattgattattgtttaccagaatgtactaaacgaatgggcaaaaggaatcctgagcgacgcagagaatctcactgaggaaagaatcgaccaagtgatcaaccaacttctcaatgatttcaaagaaggtacagttaaggaaaaaaactgggctaaatttatgtcggcttatgtggtttcaaaggcaagtttgaatggttacacgagggtcctggcgaagaaacatcccgagtttcgcgtaaacgctgtgtgtcctggatttgttaagacagatatgaacttcaagactggagtcttgtctgtggaagaaggagcttcaagtcctgtgaggttggctttacttccgcatcaagaaactccttctggttgtttctttagtcgcaagcaagtttcagaattctgaatcttcttttgtgtgagaataataagccaaaaatgtagtaatttaatgagaggattatcgtttgaatgtcgaacatatactcttagataaacaaaaacttttatgagatgttttggtaattactcataaacttgaatataattactttacaaacagaataatatatagttccataagaagaaactaaacaaaatttgagtctacttcattgcattagttaagaaattatctctttaacaatttatgattatatatatttcacaaaaggaactcccggatatttcttaggattcatgttcttcagctgctgcatcagaagtttcttcttctgtagggtttgcttcatcttctttgggttcggttttgtcttcctcagccgtcgagcgacggtggttagccgcggcttggaggacatgattgtaattacctttctcaaggaaaagctggctgaagtggaccttacagtaaaggacgccatcgagagcagcatatgaagaatgtgttaatggacaaccactatgtgcacatctgaagcaagtcttgtggtaagattctccttccattgtcatcttctctagaggataaactgttttcttacaagctgcacatttgtcttgtgtgccgctaaagaaggatgataacctgtttggagccttcgtctatgcaaatgatcacaccaagaaatcagattagaaaacaaaaagagaaaacagaggaatgttgatgaattatgtgcttaccgcatcattcgatttctcggtctttccagctgtaaaagaccaagaagagaaagtagcaaagattgttagcttttcaagagaggttaataaaaaacagagcaaagaaaacagaggatttgttagcaacctgtttggaaattcttgctgaaatttccagattctttgaagagctgttcaaaatgggtcttgcaatacaaaactccatccatggatgagtagttacatatctgaaaaggagaagaaagatgttctctttgtgttttttttttcatgagggaacaatggaggaaaaggaagatagatagataccacgagagtgccattgcaatggctgcacctgaagcatgacttgtgataaggcattccttccaaagtcatcaagtccataacgtataccgtcttgtcacacgccttgcatttgtctgttgtccctgtaaacgccgccattggtatctcttcttcttcttctttcaaattacgaaagagttggaagatggatcaaaagttttcttcttctttttgttgttcgtttagacacgaatcaaggtttgttttgccatcatctatgagctctctgcctttttattatatcaaaatcatggattgagatttttaggggtaaaattttcttctgatggttgagattcaaatgaggagagcccttaaaatgttcttctacattctaaatctatttctggctatattttattttatttaacacttatttttgttttgctttctaaattatatcgtgtaaaccaagggattaggtgcaaagtttatatatagttagcctccgattttaagatgttattaattcatatacacaattataaggatctttatacaaaataagtaacacctaatctaacatcacaagactgccttttaagcatagcttttaataatcataagcataatttgttttgttagatatcattaatcaaagggcaaagaatctgggggtctaaaatgacaaaaacaatacaacatggggtgaatacctgaaagaaaagtaaatccgagttatactgtaaataatataaagcttatgggtcatgtatttatttaacgtaaacataaaaggccattttgataaatagtgagagtctgaaaaaaagaaagaggagaaaatccattgacgccctaacaaaagacgccggcgagtgtattcgtcactttctctagtttcctgtaacccaacccactcaaacgaaattttttcttaatctctctttcgttcttcttcttcttcttcttctttagattgttgtaattccaatcggaactctcgattcgctttcttctccgttcttctgtggcggaccggttttgtggttttttatttgaacattcccgatcttgccctgagttccacgatcagtttctttaaaccctaggttttacacaagcattctgtttctccagattatcgcagactctttcgttctattctttgtagttttgtaaaaggtatttcggtagatttagggtttgtctgtgtctagttttcgagatcgagagagatttgtgatgaatactaacagaggaagatatccaccgggtgttggaacgggtcgtggtgcgcctccgaatccagattatcatcagtcgtatcggcagcaacaaccacctcaagatcagcagtatgttcaacgcggttattctcagaaccctcagcagatgcaactccagcaacaacatcaacaacaacagcagcagcaacagtggtcaagacgccctcagcttcctggaaacgctagtaacgctaatgaggtggttcagcagacgacccagcccgaagctagcagcgatgctaagtaagttcttgttcctgaatacgtcttgttgcaaattatgatgctggagtaattattatgaatgattttgtttgcattgagtaatgatttgtgctgttagagatgtatgtgttattttgaggttaagttatatctctttagtgtgctcatggattctctgttactctcagtggtcaagactggaaggctacgttaaggctaccacctcctgatactcgttatcagacagcggtatggctgctttcttctgagtttttctgtgtaggaattatgaatattgaggatattgaataaactcgtgttgagcaatgtcttccatattgtctgcaggatgtgacagctacaaagggaaatgaattcgaagattactttctgaaaagagatctgttaaagggaatatatgagaagggttttgagaagccatctccaattcaagaagagagcattccaattgctttaactggtagtgatattcttgctagagctaaaaacggtacaggaaagactggtgccttctgcattccagtcctcgagaaaattgacccaaataacaatgttattcaaggtatacttctttttccctgttgagttgataagtgatcagttgactgtttgtgtttgtccttgaaccacttgttctattttttatatgcagccatgattctagttccaacgcgagagctggcccttcagacatcacaagtttgcaaggagctttccaaatatttgaatatccaggttatggtcaccactggcggtaccagtctgagagatgatattatgcgattacatcaacctgtgcatctgctggttggaactcctggaagaatattggatcttacaaaaaagggtgtctgtgttttgaaagactgtgcgatgcttgtaatggatgaggtgagctcctgattgctttcctaatatctagatcttaagtatatcttcgttttgtggtatggctcctgcagtgtatgttcctcatgtctttattgctaaaaattgatgatgaacaaactgtaggattactgctagaaggaatttttcttaatttattctttagttttctctgtcaaagactcaaaatttgactttatcatcctctatacatatgcatagttatacttactactgttaacagtcatttaccccttactttggtgaattttgaagatctttcttgtgtgttgttatattcacctgagtttattttgttttattgtgtcataagcttcaaagtttctgactccttaaaaatgatttctccaggccgacaagcttttgtctgcagaattccaaccttctctagaggaattgatacagtttctaccccaaaatcgtcagtttttgatgttttccgccacattccctgtcactgttaaggcttttaaggatcgacatctccggaagccctatgttatcaatctcatggatcaactcacgcttatgggtgtcacgcaatattatgcttttgtcgaagaaagacagaaggttcactgcctcaacacacttttctctaaggtcagatgtctagatttatccctgtaactacagaattatgaggggcttgatttagatgttctaaagtggttatggtttttcaatcccagctgcaaataaatcaatcgataatcttttgcaactctgtcaatcgcgtggagctgttggctaagaaaatcacagaacttggttattcatgcttctacattcatgcaaagatggttcaagaccacaggaacagagtattccacgagttccgcaatggtgcttgcaggaatctcgtttgcactggtaagctttgtgttttttagcatgtactttgaacattgaccaagtgtagattatgatgatgatgatctggcttattggaaaatgactgcagatctgtttactcgaggaattgacattcaagctgtgaatgtcgtgatcaactttgattttcctaggacttctgagtcatatctacacagggttagtcgaaacaaaactggtttgtgatctagtttcttacatgttcattttaactcatgttgcgaaatgttcaggtgggtcgatcaggacggtttggacaccttggattggctgtgaatttggtaacttatgaggaccgtttcaaaatgtatgtcgttccttcttttcaatgttctaaccggtttttctattctgttaaagttttcttagtcatttatcatgttttgaaaacaggtatcagactgagcaagaacttgggaccgaaatcaaaccaattccttctaatatcgatcaagcaatctactgtcagtaaacttgtaactgtgcatgaaacgtgtctccacccaatgagaggtacaagatggttaaaatggtaagagtaagacgaatcctctctcttaggcttaacttgtcaaaacaacatttaaaatcaaaaagctatattgcatgtttaagaccagtgtgcccaatatttcaggtgtttctcaagctcgaggggaggagatgaggcaactagtacttggcggttcatgtaaagactcgttactcagtggtttggttcctaatctctcttaaagacacttgttatctggttctatggaaacctctttacgctgcacttattatgagactccctttgacttggttagtaataaagatagaacgtatgactctcctcttttttattttcgtgttgggctctgtttggaattatgggctttatcctatttaggatctatttatcatgaaagttgcacttcttaatttttgcttccacggaattattttgatttttccaaaatattttcttccacatgcttattattctagtttggtattaagctattttcgtcaaaatgtttgaaccgtaaccaatcttgttttatagtgttatatccattgagaaattatagttttcacgtgtttatttatttatttgggttattaaacataaatcatgtaaatctgaatcctgtggagatctctccctagttgatgaatagatatgatgaatttaattctttcatgaaataaaaatatatgaaacatatgtagcagaaaaagaagcatatctatgaaacaacaaacattcaaaaaaaaaaggaaaacggaaaattattaatatgaaaactacggctttgacttgtagctgactacatttacgacatatatatataaatggaccccactgagtgtctgcaaggtctttacacaacagtatcttcttctgtttctttgactctttgtgatccctaagcctacccataatacgtgtctacattttattggattgtttcgtgactctgtaatcttttttataagaaaacaagtaatagtgaaattgaagtaaatagctcagcacagaaacttcgacaaaaataactcacagattagaaaagaaaatatatgcataaatagccatggttcatttatgaacaatttattcgtttttttagtttataatttcattaaaacatgtttgtcacatcacatttcatgtccttcggctcctactacaacaacaagtcactgtcatctccattacttccacttctgctcctttctttattaacttgttcaaaaacaattctaagataaataacaataaatgttggtctctctttattatttcccggctaaagaaggaggatgtctcgtattatccgccatcaatgctcttttgtttcctgtttcttgcaatttgaatccctgagaatcctagcccacttatttactactttgccttagctgttttcgacatcaaaattttggtcatatgactcatatcaatcttcaaatttgataaaatatgttcccaattcacaaaaacaaaaaagttttcgaaagctcaaaaacctttaccatttcaatagtagataggattcttttagatttgcatttcacgaaaagagaagaaaaaaaatcgaaaaatatttgcaatcatgattttttgtttctgaaggagacctgtagttgctgtcatgaacattaaatacaaatctaataaatgttgtacgaattttgcgtgtaataaatggtcagggccggctcgaagctcgctgatcgtccttttttcgtgtctctatagcaacacacaatcgtatttatttcaaactttttttactttgtttcccatccatcaaatataagtataaaaatgtaaagaatcatcatatatagatcgtaaattcattgcttcctttggctttttatttcatctagacgacgttaaaaccagaccagaccaaatacatttatcatttttcccttttttctaaaattctctctttgattcctatcttcttctctttattttcactttgtgctttctctgtctctcctattatgagtctaaaagtctactagctgttcaatagttttgtctttctgtgtttcttcttcttcaaaaccgaaagaaattcaaaaagagtctttcgctgcttgttagtggggtgaggaacaaatgggaagaacaccttgttgtgacaagattggtttgaagaaaggtccttggacgcctgaagaagatgaggttcttgttgcgcatatcaagaaaaatggacatggaagctggagaacacttcctaaacttgctggtaaacttcatattcttcttcctctttcgtttttgttagattcttgaggagatttcggggaaagttttcatctttacatcaacatttttactagaaactccataactatggttctttgacttgttggagaaggaaagttatctcatttattaaggttttgttccctttggagaaaattccattaactggggttcttcagagattacatagagaaaagctttaatctttataactttcttgtcggtcatggtgaaacaggtttacttcgctgtgggaagagttgcaggctgagatggacaaactatctgagaccagacataaagagaggtcctttcactgctgatgaagagaaacttgttatccagcttcatgccattctcggcaacaggtcttttactttgcttctccaccttccttctctactctagctatcttcttcttcattgtctgaattctgcttttttttgtttcctcaggtgggctgctattgcagcacagcttccaggaagaacagacaacgagatcaagaacttatggaacactcatttgaagaaacgtcttttatctatgggtcttgatcccagaactcatgagccattaccttcatatgggttagctaaacaagctccatcttcaccaacaactcgccacatggctcaatgggaaagtgctagggttgaagctgaggcaaggctttctagagaatcaatgctctttagcccttctttttactctggtgtagtaaaaactgaatgtgatcacttcttacgcatttggaattccgagattggtgaagctttcaggaatctcgctccattagatgaatcaactattactagtcaaagcccttgctcgagggcaacatcgacctcatctgcacttctgaagagctcaacaaattcttggggagggaaagaggttactgtggcgattcatggctcagattattctccatattcaaatgatcttgaagatgattcaacagactctgctcttcaacttctgcttgatttccctataagcgatgatgatatgagcttcttggaagagaacattgacagctactcacaggctcctcctattggtcttgtttccatggtttccaaattctagtcttatgagagcctaatatctaagaaaaagattcaaactttgcttccttttggtttttagtgatgataagtagggatatagtatctatgtaaatcagcattagttagttgaagtacttaatcaaccctttcttttatgatttgatcatgtttgagaaaattgcagaacattaaacaattaaccattcattctcatgttttcacacacagaatcaatatacaatcaacattacatgagaataaagaaatttgcatattgaagactagaaacatccacaagttgcctttggaacaattccaatggctctgtatttagcagacgtttctttcgctataagaatgcttgagaaaattgtagatcaagaacaaaaacttcgaatgaatcctaacattttgtgagaattgaatgagaagctaggttataaaaacatttatagacttatgttttgtacgccttataaaaagaacatgatcaaaccctaacactctactacaaagaaacaaagttagaaccacagtcaaatcctttagatagggaaactagaattctaattaatggcgaatggaggagactacgtgacgattacgtaactaaaattaaacagactctgctcttcaacttctgcttaattttccgataagcgatgatgatatgagcttattggaagagaagagctacacacagactcatgttggtcatgtctcaatatatggtttcttaattcttatcttatgaaagcctaatatctaagagaaaatattcaaattttgcttctttttgggtcttctgattttttagtgaacagaggttacgtgaccgttaagtaactaaattaaattaatttttgatggtttagtaattgccaaataaaccgagaagtgaaaaaaggaaattaacaacataagagtttttgaaaaaaggaaaaacagaaagtaaaaaaggaaacttgaatccctaacggctaacacattagagaacatattcttttattaaccagaccagaaaagagaagagcgtcgtgatggaagatgatacatattcttcttcgtttagaatcattccagatattaacgccaacgctcagtggtgatttctgattcggctctgttcacatagccgttagtacgcgacgaattaagaagatcaagtctggtcagacatttcagaagcatcacgtcttgataaatctaccggagattttgagaggaatttgcagtataaacggcaactgacgacggagatggcgatagaggcggtgaattttgatcggggattataggatttgttttcagtcacggtggcggagaaactaacggttggattgcaatcttcaaaaccatacgaagcccaacaataagaaaaggaaattcagcccatgatagtccatcagattattagtcaggtcaatttctatcccatcttaattttcatttttaaatattcactttttatattttaattcaaagttttttttactatacacactagttcttttagtaaaaaaaaaagtttttaaagatatattttttatattactataaaaactttaaggtttttagtttgaataagtgttaaatttttaaactttgtgtaaactaattggatacaatatccaaaccccttaggttcaatatggtttacacattatttagatttttaacacttgtttttttttcttaaacaatattttttatattactattaaaattaagattttgtttttttggataagtgttaaatttttaaattttatgtaaactaattggatacaacattcaaacccctaaatggtgttctaggttcattatggtttacacattatttagatttttaacactagttgtttttaaaaaatgttgttaaacttacattttttatattactattaaaactttatggttttctttttctgaataaatgttaaatttttaaattttgtgtaaactaattggatacaacatccaaacccctaagcggtgttttaggtttaatatatttgataaattatttcctttttaacacttgtttttcttttattaattattttaaaactaatattttttaaattactatttaatttttaaattttggatatgtattaaatttttaaattttgtgtaaactaatttagttacgtaaaagaaccggatttagcattccgtctttttttgtttgtaagtattgtgatttcattaaatttaacacgttttcacatattcaaaatttaacacttaaggtttttcacaagtaatattattagtaaattgttttcatttttaactcaaagttttttactattaaaactgtttttattttgaaatatgttttagacataagtgttaatttaaagatgtaaaaataaaactgatttagcatcatgtccttttagtctgtaagttttgtgttattagttcaacattttttcatgtattgtaaatctcacatttcgttagcttttaatgtttttcacaaataattttcgaagaaaattgttataatttaaacgaaattaaatttaagtgttacattcaaaaatacgttataaacaaactgaacttaggatcccgtccttcgaatttcttttggtccattagctactgttattagttgaagaactttagaaaatctcctcatattcttaatgacttgagtcatcaatcttctctccatgatgtgatgtgacaatgcttgagaaaattgcggaaagaaaacaatgaaacatatttttcactctgattgtcacacacaaaatcaatatacaaacaacattacaagccattaaagagaacagagaaatttgattacactttacagttacgaagtcttgaaactttgattcgcaaattcaagattagaaacatccacaagttgcctttggaacaattccagtggctctgtatttagcagccgtttcttctgctttaagaacgtcttctccacgcttagcttcaatcattgctcttctctcttctgcttccttgtgaatcgctgcaaccttattcttcatcctctctgcatactctgctttcttcttctctagttgctcctgcattgagaaaaaactcacaaattaacacttcacttctcaatcacattaaaaccgtttcacctctctattgctaagtttattatacctcgattttcttgagttgcgcttcgacagctgctttcttgctgttttcccaagcatgaacatctgcaatcttcttctcagctctgtttcatgtcaatagtcagcaaaatcaggcaaagaacataaaaaagccaaaacctaaaaccagtgacgataaaataaaatgtcttacttgttctctgctttgctcttttcgctttcttcccacgctctgacgaaagacaatctcttttcctttgacaaatcagctagcttaacatctacaaaccaaacaatggaactcagaaactttaacaaacattacatccagaaagaagtcacacaattttgtttaagctcacctctatcgagcgatgcagacgcaggtttcgccggtgcaggctcttctacaggttctgtaaaaaaattcattccgttaaaatttcaaacataaccagcaaaattgccacagaagagagtcacaagcaaacacatacaaaacatatgcatggttatgaacataaagctacaatttttgggtgcttaatgaccatatacattgaattatacatcacaacaaaactaaatttaccaatctcgagactttaaatcgaaacgaattcgaatttaactgtgcactctaatcgtatttcaatgacaaattctatctctggagcaacccaatcctaataaccaataaaacctaatttttaaaatacagaaccaagttaaccccaaaaccaatatttcctcgtcaaagcagaagattatcagagaacagaatccataattacatgcgttaagagaaattaacttactctcaacaacagtaagggctttggagtcatcgaaaatttgctccggaggtgggttttgaattttctcctctgcaacgtctttcgtgacatcagccggagtcggagctggagctggagccggaatctctgccggagctggagccggtgtatctgctggagcaggagtcgtaaccttcgccggagattctgattctaacgctatcttctgttcctccgccatagtcgccgcctctcagccgaagaaatagagaggaaaaaagaaaaccaaattaaaaacgaaatatgaaaaattgaagatattatttccaagcaacagaaagatgtttatacgtattagccgcgtttttttggggttaaaaataccttattttattatccgttgatatataaaggcatcagatcctacggttataaatccatttgttgtgtatccacgtgaactgcgatgcagccgaacacaaaaattcagcttgccgacagacaggtaatgcggttaaacatatgccacgtaagcaaatgtcaatttgttttcattagtaaattgtttttctgtttaaataataatatgtcggacgaaagcgtgacgtggaggaagacacgctggagacagataagatactgagttgttgtgaccccacgcactctattggcgcgtggatattatccatgtttgtaggagcgcgtgtataagacgtgccgtataagatgggcctaatttattgggctcgattcatattctttatttagaggtttttaggaaagatccaaaagctatctgacaggatttgttttccaaaaagactaaactgatccaaactactccgagattcgctccgtaaatacacatttgttttctatcattctatatgatgcggaagcgttagtacaactgtacagatatcatagtttaagttccattactaaactaagtcactactcactagacatcaagcatagaagttagtaacttttaatgaagctcttttgattttacaaaaaaattaggggagatgttaacacttaacacaacacctacctataaccaacactgatatgatatcttccaaaatccaaaccatggacgtaaaccgatcttaaccaactgtttccatctgaatagggatgaaggtaaaattgttatgtctaagtgggaaaagcatgacttcagaaaaggcctaatcacattcacagcgtcagttattaatatatcgcataccttataaaactttgatttgtgtgtttaactagtgtttgctatctttaaagaagtcaataaaaacaatttaaaatggcttatatggacaaagataagagttagtgactggaatgtgcctaattatcaagtgcatcttacattattgatcttgttgtacttactaaaactaaaagtgcaatttggcacgtccactctcgtagttggaggtagttagaaaatattgacttcttagaccgtgccatgttaataccatttaatgttactggaaacaaatactaataaataatacgtcacttaaaacaaaatgtctatacaaatactattaacataaaacaaaatctctagacctgtattacatcacatgcatctcttacttataaacaataaacttctttattgtatgttttagggaataaatatatgagtttgatgtcatatcatgtttttttttttgttatcttcatacttttgtgttgcgtttctgttgattctccttttatgtatcctctcggctctctcgttaatcttttattacataaactcgtgcatcaacataaacacaaaacagaagcatgaagatgaataacaacgacggccaacataataaaacggtgacatttcctcgaaaaagcatcgtgaaggctactgttttcatcgtcgttctattcatttcagctgctatcttagacttactgggctatctcgatttcgtgggttttaatatcaccttacattcttggtttatctttaatataaatcgcagtagttaacgttaatcataatcataatttgtcttattgttttgttttatagaatgcttttgcaggtttaaagctaacaacaaagacaaaagaaccaaatccttacggatgcgacttcgtacagaaccaatcaagtcaaactcctatctcacaaaaccgcaaatcgagattaaaccccaacaacagttcaaaatcatccacgtgtccttcttatttccgttggatccatgaagatctacggccatggaaacaaacggggataactagagggatgatcgaagaagcgagtagaacggcgcattttagattggtgatccgtaacgggaaggcgtacgttaagagatataagaagtcaatacaaacaagagatgaatttactctgtggggaatcttacagttgttacggtggtaccctggtaaattacctgatctcgagctaatgttcgacgctgatgatcgtcccgtcgtccgatcagttgactttattggtcaacagaaggaaccacctccagttttccgttactgttcagatgacgcaagcttggacattgtcttccctgattggtccttttggggctggtaagcagcccaataagatgataaaaggcttattgttgttactgatttgttaatatttgggcttctaatgagccagggctgaagtgaacgtaaaaccatgggggaaatcgttggaggcaataaaagaagggaacagtatgacgcaatggaaggaccgcgtggcgtacgcttattggagaggtaatccttatgttgatcctggaagaggagatcttctcaagtgtaatgctacagaacatgaagagtggaatactcgtctctatattcaggtttctcccaaatttcactttccaaaagattatgatataaatataagttttgtgatagattatctgaatttgaataatgttgcttttaaaggattgggataaagaaacaaaagaaggattcaagaactcaaatctagagaaccagtgcactcataggtaaaaagaaagaaagtattactatactttttattttatttttaattactataagtcttcgattcttcttttatggaattaaaacagatacaagatatatatagaaggatgggcatggtcggttagcgagaaatacataatggcatgtgactcaatgacattatatgtaaaaccaagattctacgatttctacatacgaggaatgatgccattacaacattattggccaatcagagacgattccaagtgtacttctctcaaattcgccgtacattggggcaatacacacgaggacaaggtccatatatctaactaaagatttcttacatctttaatctttacgtctgatttgtatcaatttaaccctgtgtttgttgttgtgtataggctcgtgagataggagaggtaggaagtagatttataagagaggaggtgaatatgcagtatgtgtatgactatatgtttcatttactcaaagagtatgcaacactcttgaaatttaagccggagattccgttagatgcagaggagatcacgccggatagtatggggtgtcccgcgacggaaaggtggagagattttaaggcggagtcaatgattatatctcctagtgaagagtctccttgtgagatgcttcctccttatgatcctctagctttaaaagaggttcttgagagaaaagctaatttaactcgtcaggttgagttgtgggaaaaccaatactttcaaaatcttaccaacaaaccttaaattgttttgttttttccttcttcgttgacgagatcaaccgcaaccaaatagttcagtcgtgggaggatcaatactctcttgatttgacttataaaccttgatttttttttctatcatcattaaccatttgtcgaatatacttttcaaagtatactttgtttatggtcttgttatatgctcatctcattgatccttttaaattagattatcagaagagatatgtaagtctttcgaatacatctacattctagctcgtatataaataagaagaagtgaaaaaaatttaaacgatttttggcatgaagtgattttgttgtcaaagtgaattaaatacagaaatttggagggcactattgttatattaagataaggtgggaactagtcctaaacttggcctatcatggcaaacctttttttctaatatcctgccaatctttttgaccaattgaatattctttttctttcttagaaatttcttaatcattcatctcatctcaactagaaagttttttttttcaaaagtaacttataatttctttcattgttggtaattttgtgagatcactcgggctccataagtctgtttcattgacaaaaagaaacaactgtaagaatattttctcccaaaattaataaattaattaacatggaatatatatacgtaggtgggttgacttgacttagttaggctttggctatggttctccttaaagcctttataaaataagccagcactaattaaatatcagtcatgatctttttaaaacacatgctgaaaattgtttttttttaaaaatcaaacatataattgtactaatttagacctccaaacccttaaatcaacccattttctacctcataaaagagatccatgataagtgagctctgcttcatctctttctagttcttgtgttcttgttgtgttttgtccgatgagagagaacacacaagtggctcaattcacagaagatcatcaccagagacatcaaaccccaataacttgtttaagctctaaactagcaaagatatggacattgttcaccaccaaaatcttcatcttcgtcctcttcatcatcctccttagtgcttctgtctcttggatgtatgcggtatatatttttctctttctcttgatccaccagtcatatctatatataaacctctttcttttggcttgatgataaattatacatataacaatatctcatacgacacgttaaagagaattatatattgtaaccagtgtgtgtttgtttgttttctctactctttaacccatttaaataatttcatattttgctacttatatacttgtattccgaagttggatcttaaattattttacgtggtgtcgttaaaaagtttgttttaggtgagaataaattccaagtgacatcaatattcacaagaaacaccaaaaaaagcactcccacaaaaacaacaacaactacagatatccccaagatcgccatcaagatcccattaaactgcacatcactcaacagcaacacaacacaaacatgtccttcaaattacccaaccaagttcgaaccagcgatctcttcctcggagacatgtcctgactacttcaagtggatccaccgagacttaaaggtatggcaaaagacagggatcacaagggaaacactagagagagcaagaccaaatgctcacttcaggatagtgataaagtcagggagattgtacgttcatcaatacgagaaagcatttcagacaagagatgtgttcacaatctggggaatacttcagcttctaaggatgtatcctggtcaaatccctgaccttgagcttctcttcctctgccatgatagacccgccatttggaaaagagacttgaagaaaaaacgaaaggatacgtggcctcctccgccgttgtttcactactgtggtcaccgtgatgcatacgacatagttttccctgattggagcttctggggatggtatgacttttcatcaacattatcacaataatatctctaaaatctggtcaagaacgtatatgggcccgtattaacaaacaaatgacataaacattgactattcttttctttaggcctgagctgaatataaaggagtggaataaattatctgtggcactaaaagaagggaacaaaaaggtgaaatgggaagatagagttccgtacgcttattggaaaggaaaccctcatgtttctcctataagaggagatcttatgagatgtaacttctccgacaagtatgatcctatggttcgtctctatgtccaggtattacatatatgtctcctatatatacatgtttcaatgtgtatgtaagtttgaaaccaaataattaatgaaacttgaaattaatgacgtcacccgcattctcaaataataaaacatgtactatagtgatcttgtccaggtattctcaaacatgtactaaagtgatttaaatttttcattgattcatcatttcattgtgaccttgtctcatatgttgtctaggattggaggagtgagatagaggcagggttcagaggatcgaacctagaagatcaatgtactcataggtatatgtgcaggatacattcactagatcacgtatatcttattaatattaggtttgtttttaatatattagtaaacattttggatttgaacttggacatttagatataagatctacatagaaggaaacgcatggtcggtgagcgaaaagtatatactttcgtgtgatagtatgactctgttggttaaaccagagtactacgactttttcttccgaagtatggtcccaatgaagcatttttggcctattagacaaaacaacaaatgtggtgacctcaaatttgcagtcgaatggggcaacaacaacaccgaaaaggtaaccaaaaatatctaatatctatattgaaattttcaataattttaaattctagtgactagtttctaatttctgatcagtgataacctgtcatcacccatgattctttttgtgattgtcttaaattcattatatatatataggcacaaatcatagggagacaaggaagtgagtacatgatgaagaacctaaagatgaagtatgtgtatgattacatgttgtatgtgttacaaggctatgggaaattgatgaagttggatgtgacagtgcctgaaaatgccacggaggtttgttcagagacgatggcttgttcgattactgatggtggacggatcaggcagtgcatggacgactcgttggttatgtctccgagtgtcaaggcggcttgtgatttgccaccttcttatggagactatgagctcaagaagtttcgtaagaaacaagaaagtgcggagagaaaggttgagcagtggaccaataagtattggaacttgagagatccaaaataagataatttcgtccatggtgaaagtgtaattgtaagtaggagtctggtttaatttgtatgaaaataaatagaatccaattttgccagtctggttaatttttgtatttgaattgactaatagagaccctataattaatgcatgtcatattttttctcatacaatctaatttgatttataatcaagagattctaatcggtgttaaaaacaaaatgaaatcctacttgatacattagaatctatcttacttaaattttgcagacctaatatacatgcatctagtagagaataatataaattaagtagaaataaataatatgttgctaaaaaaaaaaagtagaaataaataatataaaacagcaattaagttatttggtcacatatatttcctgtattgccaataatttaagatatttattacttcttttctaaagcctaatatagtaatttaatgttcattatatcagattacaataaataattgaatcttcttaccaaaaaaataaaaataaataattgaatctctcttataagtaggggttttttttctgagaaattaaacgaggtaatctaaatcgaaacctgcaactatgaagatgaacaacagaggttttaatcagaagccacgtggaatttatcatcaaaatctgagttccaattctaaattagccatcattctctgcatcatcatcttcattctaatctgcagtgcttggatggatttggtactaaaattctttctcattttctaatcattttatacatacatacaactataaaattttgacttttcatatagtttgtaataggtaggatccaaatgatgactacatcaatattgacaacgacaaacacaatcatcaaaatccctttaaagtgcaacgcaacacaaacatgtccttcaacttatccaagcagattggaaccaatgatctcttccttggaaacttgtcctgactacttcagatggatccaacaagacctaaaagtatgggaagagacagggatcacaagggaaacactagagagagcaaaaccaaaggctcatttcaggctagtgataaagtcagggagattgtacgttcatcagtacgacaaggcttatgagtcaagagatgtgctcacaatctgggggatacttcaacttttaagaatgtatcctggtcaagtccctgatcttgagcttctcttcttctgtcatgatataccagctatttggaaacgagactttaggcaaccggaaccaaatgccacgtggcctcctccgccgttgtttcagtactgtggtcaccgtgaagcctacggcatcgttttccctgattggagcttctggggctggtacgtattatagtaagtgtttaatttatttatttttcacatatatttattttcattaaaaatttctaaattatgatttaggtattaggtttatatgtttctaactactttaaaataaacaatattttcggatggcattttcagggaaaaaaaaataaaaatcattactaaccaatagcaattaggaatttgaaatcagtgttttttttggataatgatttttaagcggtacaacatgaaaataccaacgtttgaagaagtttttttttttatagcgaaactaattaacaacgttttatatccataatggaaccaattgacaaaacaaatgaattaaccaaactggtattattaacaaaatcctacaagcagccagtgtcgaccatttacatcattaaccgaattaaaacgttacaagacatctaatagtgaaattggtcaagacgaaaaccagagccaaaaggccaaaacctattacaagactaaaaacaaaaacaaaattggtcagaaatgtaaatgtcccatagcataacattttttttttttttaacgtaaaatacaatgctaacttgctaatagaccgtgagactgagacatatagaaaaccggatattcttaccacctaatagtgaaagaactttttttgtaactattattttgttgttgtgatataggccggaggtgaatataaaggagtggacaaaattatctgtggcgattagagaagccaacaaaagggttaaatggaacgatagagttccatatgcttactggaaagggaactctggggttcatcgcgaaagaggaaaccttatgaaatgtaacttctccgataagtatgatcccatggttcgtctctatgagcaggtatatttgtccatccctttccagcatccagtttaagtgaaatttttgtggaggtctatctcagagcattacagtactagctcacgaatttatagaaaataaatctgatacgtaatagtaatggcgatttcaggattgggggaaggagagggagatagggtttaaaagttcaaacctagaagaccaatgcacccataggtttatatgcaatgaatagctatctcatactattcatgtttaaacttttttggattttgttaaatctttgttgatttggggatttggaattggacattaaggtacaagatctacatagaaggtcgagcatggtcggtgagcaaaaaatacatactagcatgcgacagtatgactctactgatcaaagccgagtacttcgatttcttcggaagaagtttggttccgttagaacattactggcccattaaatctcacgagaaatgtggtgatctcaagttcgccgtggaatggggtaacaacaacactaagaaggtaagcaacatctatataattatatatatagtatccaagatcttatatctatttcaatcatcgataatcgtttgaaatctatatatataggcgcaagttatagggagacagggaagtgattacattatgaagaacctagagatgaagtatgtgtatgattacatgttgtatgtgttgcaagggtacgggaaactaatgaagttggatgtgactgtgcctgaaaatgcaaccgaagtgtgttcggagacgatggcttgtccgatcactgacggtggcctgatcaggcagtgcatggacgactcattggttatgtctccaagcgttaaatcggcttgtgatttgccgcggccttatagagatgatgagctgaagaggtttcttgagaaacaagaaagtgcggagagaaaggttgagaagtggaccaatgagtattgggaggcccaaaacaagacatttcaacaaagaaagtaagtacaattcacccgggagtaatgcaagtggtataacaatattaaatgtttaaaactttatgtcagtcgtcatataagcaccaactttgtttgtttttttaacaaatgaatatgatatcattaattcttttctgttaactatcattattggttagacgtccgattttcacataaatattatcaatttatcatttaaacaatgcagggaaaataattggaaccttggttcgttggtgctaatgtaaatgaaataaattagttacaagttaaagaagcattgcataattgaccccaaaaattacgagtttacattgtaaaattaggcatttgcccaaaatatatatatatatatatatatatatatatttacagtaaatagccaatttgtggaaggtattcaatttatttatctgcaaaataattttcgatagatagttgtgagaaaaaacctaccaagcgaattcgatagatagattttttttgcttgaggttttaacaaatttcatgtctttttttttttctgataacatacatgacattttctgaaaaccctaccacgcaattttactaattttggatttaaatacgacaatgtacctaataagcccttgcattatccccaatcttacttgttgacaaataatgtttttatttaatatcatataaattcataatcaaaagaattctgatgattggcgtcacgattaataacagataagcgcgttgcgtgaccctaattaaatacggtcaacgtttaattacattacaaaattcccccaaaaaaacatttgcctagttgtcttgtaagacaagtctccacgatctcataagtgtagaagaaactttcaaaaacctctgctctgttttcttcagaaattttttaagtaaaaatgatgagtaatctgaaacttggcgttgaagtcataagcgcaaggctcaaacctagagaggactatggcggtgttaacgcttacgtcgagctacgatttgacgatcagaaagtcataactatgactaagatcgatgactctagtccggtgtggaacgagaagttcttcttcaacatctctgatacagaggatttatcaaatcaatttcttgacgcttacgtttacaataaaaccagcagcataacaaaatcttgtctaggtaagattcgaatattgggaactgcgtttctcccgtactcagaagctgttggattgccttatcctctagagaaagagaaatggagcatgttctcttccgctgccgccaatggaggtgagctcgctctcaaagttttcctcactgataacccctctcccaaggtaccgaatctaatctctacaaagaagattccttctaaatcaaggcacaaatttcacaacatccccacaaatgagagtaaccatagcccacgagggaatcagcaatcgtttcaaccgcaaccgcctccgcctcaatcgcaaacggctctaccgccaccgatgatggagtcttctctctatcaagcaccgaggtttggtactccgatacctacaactatggggtttaatccgaatccaccggattattctatcaaagagacgaaaccgattctcggaggaggcaaacgagcaagatcaagtgatcatgatctcgtcgagccaatggagtttctcttcatcaaaatcgtgaaagctagaaatcttccatccatggacttaaccggaagtctagatccatacatcgaagtcaaactcggaaactataccggcaaaaccaaacattttgagaagaatcaaaacccggtttggaacgaagtcttcgctttctccaaatccaatcaacaatcaaacgttcttgaagtcatcgtcatggacaaagacatggtcaaagacgatttcgtcggtttaatccggttcgatctcaatcagattccgacacgtgtcgcaccagacagtcctttagctccagaatggtacagagtcaacaacgagaaaggaggcgagattatgttggctgtttggttcggtactcaagccgacgaagcgttctcagacgcgacatactcagacgctttaaacgctgttaacaaatcgagtttgcgttctaaagtctatcattctccaaggctttggtacctccgggttaatgtcatcgaggcacaagacttagttattgtaccagaccggactcgattgccaaatccatatgtaaaaatccggttgaataaccaagtggttcgaaccaaaccgagtcactcgctgaatccaagatggaacgaagagttcactctcgtcgcggctgaaccgtttgaagatctgatcatctcgattgaagaccgagtcgcacctaaccgagaggaaacgctgggagaggtacatataccgattggtacaattgataaacggattgacgataaccggacagtgcctaaccgttggtttagtcttaaaactgagaaccagagaagagtcagattcgcgacgacgagacttcatctaaacgtttgtctagaaggaggctaccacgttcttgatgaatctacttactacagcagcgatttcagaccgtcgatgaaagagttgttgagtcataaacaaccgtcttttggtgttcttgaattaggaatcttgagaattgaaggtttgaatttgagccaagaagggaagaaggagacggtggatgcttattgtgtagctaagtatggaaccaaatgggtcaggactcgaaccgttacgaactgtttaaacccgcggttcaatgagcagtacacatgggaggtttatgagccagcaactgtaataacaatcggtgttttcgataacaatcagatcaatagtggtaatggtaacaaaggagatgggaaaattgggaaaatcagagttagaatctcgactctcgaagccggaaggatctacagtcactcgtatccgcttcttgttcttcgaccttcaggtttaaagaaaatgggggagttgcatttagcgattaggttttcctgctcatcgatgtttcagatgctaatgcagtactggaaaccgcttcttcccaagatgcattacgcaagaccgttgaaagtagtgcagcaggagattcttaggcagcatgcggttaacttagtggcagctcggttaagtagagccgagccgccacttagaaaagaagtagttgaatacatttcggattcaaattcgcatttatggagcatgaggaagagccgtgcaaatctcttcagattgagttctgttttctctggtttactaggaaccggagaatggtttcaagatatctgcaggtggaagaaaccggtagaaactacagctattcatataatcttcttggtgttagtgtgttcgccggagatgattcttccagtgatgtctctttgcttgttcatgcttggggtatggaactacaggctccgtccaagacaacctccacacatggacacaagactatcatttgcagacaatatccacccggaagagcttaacgaagagttcgataccttccctttttcgtctcaagacccggggattgtaaaaatgcggtacgagcggttaaggagtatcgctagtagagctcaaacggttgtgggagatatagcaggtcaaggagaacgagttcaggctctgttaagctggagagatccaagagcaacttcgatcttcatggtgctttgtttggtttctactgtcgttttgtatgttgtgccgtttaaggtttttgttcttctcgccggactatacatcatgagacctccaagattcaggggtaagacacctcctggacctattaatttcttccgacgacttcctgctaaaacagattgtatgctgtagaatgctaaaacgtataagaaacaagcaattttttttcccattcataacaagtcaagagaccaaatcaactaactgaaagctcgaaaacacgcagaaattcctaaacttactaattgtctttttctttcctaaacaataccaatagactactttgtttcagggaggttagctcaagtttcttcttcttctcctagattcaatgcttatatatacatgaatcatccacgcattagatcaatgtccatatgggggtgatgcatatccattgaccttgaaccagttgaccaaatgcctacaggagtctgaacaatgttctgactttgctgaggaacaggaggtgacgttgctgctgtgttatcgttgttgttttccaaagcatcagtatcttggacatcttcagaagtttcttcacgttttttaatcttccctttcggaattgcccaaatgaagctgccaacaatgaccttttaaggaggcaaacacacatagttaagcataagaaatctaaattcatctaaggaatttgataacaagcgtaagctcacctggacttggcttgctgctattagaggacctccaattccaccaccaatgacacgaccatcggggctagcaagtgagaccgctagacttccagtgcggtttgggtagtcattgtcagttgtgttcagataagaagttgagagagatatgagctcgaatagaccctataagtttcaaagtatacaccaaaataagtaatgtttttgtcttctaaaagataataaaatgtgagtgatgattcaataaaacctcgtatataatagttccatgagaaggtgctggctgaagaagagttgcagtagagacagcaccacttgcggataagacacatatcgctcgtggaccttgatgcgagaacgatataacctttgaagcaatgtcctgaaagcaacaccgagagtatggttatctcaagaactagaggcaagattacaaagaaaaaaaagaacagatttattcaagaggagacagaagaaacatacttcaccaatggaaactacgattacatgcggtgtgaagctcatcccagttgatgaaggcatcatttcaccttacaaaaaagaatcaaatgtcttcagaaaaatcacagctaattgtaatcagggagaaacagagcaataacaaagtttaagagaaaggccaaggaataataaaagaataaatattgaattcaacaatttgacattataaaattccacagctttaattaatccttaacagttcgaattagcttataataaacttcccaccaatgtcctcatttgaaaaactatatcatcaattaagctcaaaacttcccaccatattcagagccaatgtccttgtcggaaaataaaactcataagttagagattagggatattaccaatggaagatagccgttgcttcttgccggagccaggaggtcttccacggccacgtttgttagagttcggggaaacgttggagatagaaggagacaatgccaacgaaacagaaccaccatcttgtccatattttctaggccgtcctctcttccgcttcacagacgtgtcacctgaaggaggagcaaccaaagctcccgccgccgccgctgacgaatcagccggagaagagtcaacgggtaaaggaggagacacgaatccagtagagacacctccagggtttggatttgggtttgggtttgacccaaaaggagagatggaattggtgaaatgatgaaatccttgtgatccgtgaaacgttggttgagtttgaggaggaggaggaccagaaccggggattcctctttggatatagtaagaacccgacccggataacgccattgcgtctcttcgatccatagcttaaccaaaaagactctgactttaacttagtaaaattcgatggggaccctaaatggctaacttataggaggagggataagaagagaacaaaatcagaatctaaaagggttcgatagacttcaagagcaagataacaacatgcaaccgaaaatctctgaaaacttatcaaaacacacaaactttcatttcacctaattgttttttatgtagctttagtatcaagctatgagaaaatctcaagatgaaattagatccaaaagagaaaaggaaagaactttaattttcttcatctcttcttctctgtttcattctctcaccaaaagcaaagaaatgaagtgtgaataagctttctcatccatcaatcaacaatggtgaagaaaaaaaaaagttttctagggttctctctctttctttcttcagagtgtatgtgatgttgctttttttcttttactgggtgacagagggaaaacagaaacaaacaaaaaaagatcctttctccaagcatttactgtggattacaatacaatgggatgatgaggcaggatttcaaaattcgaaattaaatttgaagtctctgacttttgactgtgatataagctctctctctatctctctaatagacttctttctagcatctagcaatttgtaggagggatccatccatccatcatcatcatcatctttgtgtggctcattctcaacgctatagattaggtgcgtgtatcaaacgaagcattgggaatgagagagtgaatctcacgcttctgatgtcgagagtgagagaatagtgatgtgatctagtcaagactttctttgttcctcactggcttccacttcatcataagctttcaaaatttatgaatcccccaatctatctttagactctattttaccataaatacttgagactaatgattatatattggcattaagagacatataacatgaatataaattcccattttgtggagtaaatattgttcttgtctctgttctgttcactttaaatcttcatttttctctacaaacaataatcattaggacccaagagtttatcaacaatacagaatctgaacgtttagtactcatgtcatgtgaagtgaagtgaagaagatcaacaagaacattaattgtttgctataatcttctatgggccggataggaataattaggcccagtatctaacacatcaaacaaaaacacatcgaagtcgaatcgtcggtgggataattaggcccagtatattcaaacaaaataacatttaacagatccaagtccaatgttgtcgtggaacgaacgtcgtttagaataattaagcccagtatttaacatatcaaagcccaatgttgtcctaaaacgacgacgtttgaatgtggaacgtaaacaatcctggaacaaccgtttcaactacctttttcctatcacttgttttttcacctctcgaagtcctccgatttgctacccttacgcagcctcatgtgtcaaccaccatttctcttcttcatcttcgtctctatcaaaccctaaacctaaaaccccttattttcccgccaatgtatcaatccatgaatctatcagtttcttccaatttcactcaccgatcactcctcgaatcacgatttcctatattctccaccggattccgcaaatccgtcaatctcaaacctccccgtgtctcatctggtcctgaatccaacgattcaggtcacgaaaccttaaccgataagcttatccatctcctcagagctgttccagattgggcagacgagattaaagagcgtgggatgcagcagaaacgctctctctacacacacgagaaatgggttgaacatagaagctctcttcgccatgtgcgtcatctactctcgagcttttcttcacgagttatactctccctgattccacctgttttcttcttcacaagcgtcgcggttgtgatcgctagctacaactccgccgtggctttggattggcttcctggtatttttccaattcttcgatcctcgtcgttgccgtatcagctcacagctccggctttggctcttcttctggtctttcgtacggaggcttcgtattctaggtatgaagaaggaaggaaagcttgggttgggattattgctggaactaatgatttagctaggcaagttatttgttccgttgatagctccggtgatgaattgatcatcaaagatttgcttcttcgttacattgcagctttccctgttgctcttaaggtaaaaaatattcatctcttgcttgactctattgttggtttctgatgctttaatttcatttgcagtgtcatgtgatttatggttcagatatagcaagagatctccggaacttgatagaagcagatgacttatctctgattcttcaagcaaagcatcgtccgcgttgtgtaatcgagttcatttctcagagcattcagttgctaaaactagacgatgcaaagagagatttgttggtagcattcttgaatccttgaactctctattaaaattctttgctatgaacacttgacaccaatatatgttctttgcgtcattgcaggaatcaaagatgctgcatttacatgaaggaattggagtttgtgaacaactcatgggcattccgattcctctctcttacacacgcttaacctcgaggtttttagtcttttggcatctaactctcccaatcattctctgggatgaatgccattggattgttgttcctgctactttcattagtgctgcctctctgttctgcatagaagaagtactttgtcctcctcctcctccatacttaccctcttttgcttgaatccttaaccattaaaccttctttttggattggaaactctgcaggtgggtgttcttatagaagaaccatttcctatgttggccttagatgagctttgcgatcttgtgcatagtaacatccaagaagctgttaaatctgagaaagtcatacgtaaccgcatcattgcaaagataaagctccatgaattcaagcactcatcaaatggtcgccatagatcttgattaccggttggtgtgagtgatgtaggttgtcttcccgagggagctaagaacatgtgatggcttaggttagctttgatatatacgtatcgtatgttagagtaaaattcttttagaggtaatggagaaagtgtttaagtgttttgagagagttttttaggaaatagaacttttattactttgctttaaacttgaatacaacttcacaacattgcaacatttgagagggggaggaggtatttatagcctccaaactacaaaatatctaaaatattttaatcctaagtctagagagttcttacataagatctagattacattattcaaattatctagattattctattagagtatctagatttttatgtttaaggaggtggaagatgattctagaaaatttctagaatcttttaaggaggtggaaatgatgatatttctagagaaaactctagaacttggatttggccataattaattattggataattgatccaataattaaacttgattcaaaatcaagtttaactttcaacaccccctcttaaacttgattttgctactccaagcaaactcctcatcttgataaagttttcacgcttgagaggcttggtaaaaaaatcggctacttgatcatgtgtcttcacatactccaattgcacgtccttcttgctaacacactctctaatgtagtgatagcgtgtgtcaatgtgtttacttcgatcatggaagaccgggttcttcgccaaagctattgccgacttgttgtccacaaagatcttcgttggttcctcttgtggtaagcttaactccttcaagaggtttcttaaccaaatagcatggcatacacatgacgtagccgctacatactccgcttcacaagtggatagagtgacaattggttgtttcttcgacatccatgtgaaagccgtgtctccaatgtaaaacacaaaaccacttgtactctttcggtcatctacgtctccaccccaatcgctatcgctatatccaacaagcttgtaatcactagtagttgaataatgtaagccaaagtttacagtacctttgatatagcgaagaatcctttttgccgctttgaaatgagttgttgttggatgctccatgtaacgactaacaactccgaccgcatataaaatatcgggccttgtgcatgttaagtatctcaagcttccaaccaagctcttaaaggttgttggatccactccttccccttcttctttctttgatagtttgattccgcattccattggtgtacaaacgggatttgagtcatctatcttgaacttcttaagtacctccttagcatagccttcttgagttatgaatattccattgtcttcttgttttacttcaattccgagatagtaagacatcaatccaatgtccgtcatctcgaactccttcgtcatctctttcttgaattcttcgaatatgcttggattgttacccgtgaatatcaagtcatctacatataagcatgcgatcaatatatcttctttttgaattttgatatagagtgcatgctcatatggacacttgatgaaatctttctccttgaaatacttgtcaattcgagtattccaagctcttggggcttgttttaatccataaagcaccttttttagcctcaagactttgtcttcttcacctttgactatgtagccttgtggttgctcaatgtaaacttcttcttcaagatctccatttaagaaggccgacttgacatccatttgatgtatcttccacttgttttgagccgctagtgagatgattagtctaaccgtttctagacgagcaacgggagcaaatacctcgtcatagtcaattccgactctttgactataaccttttgcaaccaatcttgctttgtatctttccacttctcctttagagtttttctttgctttatacacccacttcacgccaattgccttgtgtccatttggaagtgaagttaactcccatgtgtcattcttttgtattgatttgatctcttcatccatggcatttctccaagtcttcttttcaatggctttttggaaatccatgggttcgcactccgcaaataaacaaaataaggtaaggttttcttgattttcggttacctcatagagctcttgtatacttctaaaacgcggagtcctttcactcgaactttcttctatttgagaacttgttggtgaagttggtggtgtagtaggctcttcacttggtggctcctctcttgttggctccggctcatcttcttcaaaatgtggaaagaagttataatcttcttcatttgagttccaatcccattctccttcttcatcgaacactatatttcgactaataattgtcttcttcgtatcgggattatagagcttgtagcctttggagttgttatcataaccaatgaagatatacttctcacttttgtcatctagtttgctccgcttctcatccggtacatgagcatgagcaatacttccaaagactcttaaatgagaaacaccgggctttcttccgctccaagcttcttgtggtgtttttccggagacactttttgttggagatcgatttaatagataaaccgcacacgcgaccgcttccgcccacaactcttttggtagtctcttacttttgagcatgctccttgccatctcaagaattgttctattctttctttccactacaccattttgttgaggggatcttggcaccgttaattgtcttcgaatgccgttgtcttcacaatacttaagaaactccttggatgtaaattctcctccacggtcggatctcatggttttgatcacaagaccactctccttctcaacatgggctttaaactttttgaaaatttcgaacacctcggatttttctttcaaaaaatatacccatgtttttcttgaaaaatcatcaataaagagaaggaagtaattacttttaccaagtgatttcggcttgatcggaccacacacatcggtgtgtattagctccaacggtttttgtgctcttgaacttgactcctttggaaagctcattttgaattgctttccaagtagacatccttcacacacttgatttggatgatttatacaaggtagccctctcaccatttccttccttgaaagcaactccaatcctccaaaatttagatgtccgaatcgaagatgccatagccaagactcctctttgtaacacatcttaagacattgtgcaatgtcatttcgaatgttgaggacaaacattctatttttcgacattggcaccttggtaatgagattgctttcttggtctcttattgaaaggttattatcttttaatctaatatcataacctttctctaagagttgtccaaggctcaagatgtttgtcttcatgctcggaatatagtaaacgttggaaataaattgatgatctccattcttcaatcgaatgagaatgtttcctttaccttttacctccatcttcgattcatctcctaaagccacatttcctctcaccgattcatcaagctccgcgaacatactttttctcccgcacatgtgattacttgcaccactatcgaggtaccacttatgattctctttttgttcatctttcttgtagctagccattaataacatgtcttcttcttgaattttttcttcaacgtagtgggccttctcctcaaattttttgttgctaggagctttacattcagaagcataatgtccaaacttcccacaattgtagcatttgacacttgatttatcgtatcttgattttgggtgtcctttcccacgacctcttgatgagttttcacctctttggtttgtgttgtcttcatgtggcctccaaccacgtccatttccatatccaccacgacctcgtcctcgtacttgaccaccacctcttctttggtaactttggccgttttcttcttttgtaatttgcatattgaggacttgttcggcgatatcttctttcttcttcttcttttcttcataagcttgtaatgacccaagaagttgctctattgtcatagcttctaaatcttttgtttcttcaatgacggtgacaatatgctcaaattttagatccaatgatctaagaactttctccatgattctcacatcatctagcttctctccgtttcttttaaggttattagtaaccgtcaacactcttgagaagtaatcggagacgagttcaccttccttcatttgtagtgcttcaaattctcctcttagagtttgaagacgtactttcttgacttgatcggcacctttgtaagaggttcgaagcttctcccatgcttctttcgccgacgtagcttcaacgaccttctcgaacgtatcttcatctaatccttgatagattagacagagagctttcttgtctctctttcttgagtctctcaaaccatctttttgagtttgagaaagactaccttcattctccggttcaatgaaacctttctcaactatctcccacacgtcatgtgctcctaggatagccttcattcgtagactccaattatcatagttgctctttgtgagcaccgggacttggaagggaacattgttactcgccatctttaggatcttcaagctctgataccactttgttagagtaaaattcttttagaggtaatggagaaagtgtttaagtgttttgagagagttttttaggaaatagaacttttattactttgctttaaacttgaatacaacttcacaacattgcaacatttgagagggggaggaggtatttatagcctccaaactacaaaatatctaaaatattttaatcctaagtctagagagttcttacataagatctagattacattattcaaattatctagattattctattagagtatctagatttttatgtttaaggaggtggaagatgattctagaaaatttctagaatcttttaaggaggtggaaatgatgatatttctagagaaaactctagaacttggatttggccataattaattattggataattgatccaataattaaacttgattcaaaatcaagtttaactttcaacatcgtatagaagatacaacactttataccagttgataggtaaacgtttgtatatcttccttttgtatatgtttatgttgtatatataatatgcagattcaactttttacacttttacataagtcatagtttgggtcaggaagccagttataccatatttgctttatttagaatccatttactatctcttgaaactaattctttagccttgttgtaatgttgttattgcacctaaatgaataagaatatgaaactcatctaagataattggcaaaactgctcatgaaaagaagagttttaaaaagctacaaaacttgagccaaaagcaaccatgactcagaagtgtatgtctattattcatctacaatctcggaaactaaaaattaccaaaaatcttatatagaactcatattaccaaaaattaaaaaggatataaataaactagggttttgaggggtggtacaaattcgttagctctattgtagtttgcttattaaatatcagacacaattcccaaagtctgattgctcgtgaaattttataaatagcaaagtatttgagcttaaaacaaccatgtcttacaagtgtatgaaataaaagacgaataccatcactagaacataaaagtaatctgagaaaataataaacgggctatgttatacgagcccaaaatcctgaaaactttgacacaagcttcacatcctccaaatgggtacaaggttaacatcctctaaatggtcaagaaaggtgtaagctttgtgactctgaaaagtttccattcctttgattttaactatagtgatagtgttcctatcgggattgtaatagagaaggtagaaaaagtcggatatagtgtttggggacaacacaatttcacctttacgagtcgttccaacgaaacataacttggtctcttcatatacattcctccacggaggaggcaaaacgtagatatgacttgaccattcgtgtttctccgcgtcttcaagaacccatagttgaataccggtgcatacgttgttaggcatgttgggctgaagcttagctaatttacccttgtagtttactagaattgaattcagccgccttcccaagtacaatatttccatgtcatgaccagcaactttcttgatatatttgaatttgtcagatccaaactcaaagcatactacatcaggatacctgtcgtcagaaacaccatggacaatggctaagtaatacaaaacaccattgatgcataccccatcatattgagaaaagccattagtatgctccacaggaacaggataatgtagtatgtcacattcgatcattttccttgacggtttcttcccggtttctaacgtgtgaacttgatgctcttcagaatcagctcgtcctatacatgaacgcgtcatgcataatactttgaaatttttgtcgatcggatcaaaccccaaaaagcttatcactcctttcctccttgttttcactttacgtaagaccacggattcccctgtgctagggttacatatcaatggctcagtaaccgtcgttccctttgtagttcgttgatgtaaaccacataaccagccacgaacaggacgacaaatattagagggacagctaatcgggaaactcatatgcaaatttgcggctataggagacagatcttgaggatgtggtgatgagaagaagaacgtttcgcagtcttttaggcatgtaaacaagatcttcggacgagacgaagatatggtcaagtaggactcggtgaaatgctgacctcgcaatgtggactgccatagcttcgatacgtaacgaaatctagctatagacttgacaggcaatctcaagagtatctcgattacgagatcgaacgggatccgttcggatttctcttcttctttcttttgattcgaacaagatcgtttcttgcgccgtgtcatcatggtggaggcggcttctcttaaaaccctaatgactttttttctcccttccgtctgattaaacctaataataatcataacgcttaaaacgtgtctctcaagatcctgggtctttctgatttaaatgagaatataaatgcctacatgtataaaattaatagtatgagggtatggctgcaaaataattaaaaaatgagctgacgattcaaaacgatgccgttgtggtttcttagaagaaagtgatcgtcttcttcttcgccgggaagctcacaaacggaatatactctactgttccttgcgacgtgccctgaaggtaacttcttctagattcctctcaatttctcatcttatttcttactttttcctcagtctcgtttcttctgagacgatttaagatctgtttcgattctgattttatttatttatttattgctggagttgtagatctgattgtatgtgtagtggatttgatgtaattgctgacgggtttgatcagtggactgtgagagttaaataatttggtttgacattggatctgtacttgttggaattcgatctgtttcttcatctttgaatgtttgatttgttgttatggcaatgctcttgtttatcttcaaatatcttgattaatgctgctcttgatcacaaaggccacttatgtgaattgctactttaagttagtatagggattagccatatctgagccagtgtttgtctctcttttggtcatgaacaggattttgtagaatcaattcacaatggcgtgtatagtagaggatccacaacgtgcaggtcaatcaaatgagacacaaattgcacttataagcggagttcctgatgatatctcaaaatcctgcttagctagagttccaagagaatatcacatggcaatgaaatgtgtttcaaggagatggagagattttgtgtgcagtgatgaaatgtgcgactatcgaaacgagtttaacttggctgaatcttggatttacgcgttgtgccgcgacatatctggcggtgtcttcttacacatgctgaatccgttctcgtccagaaggtcatggaaaagaatcaatgattatccatatatcccaatgagagaaggcatgggttttgcagtattgggtaagagactgtttgtgttgggtggatgtggttggttagaagatgctactgatgagatttattgctatgatgctgctatgaacacttggtttgacgtagtacctcctctttcaactaaaaggtactaatatttctcaggattcttaatcttgccattagcagcaaccagctcgatattgttctttccagcccttgatatttcgattgcatatgcagatgctactttgcttgtgaaacgctggatggaaaaattattgcaattggtgggttaggattgaatccaaacgctaaacgaacttgggacatctatgatcctttgaccagaacctgcaaatcttgttctgatgtgaatattgtccctgaaatggaagattcatttgtaatggatggaaggatttatattcggggtggtgttggaggatcttccactgcagtctatagtgcatctagcgggatttgggaacgtatggatgatgatatggcatcaggatggcgaggtccagcagttgttgtggcaggtgatctctatgttttggatcagacttttggagctaagctaacaatgtggtgcaaggatacgagaatgtggattcatatcgggaagctatctcaattggtgatgaagcagccttgtcggcttgtatctattgggaatagtatctttgtgattggtaaggattgctctactgtggtaattgatgttgagaatgtgaggaagaataagatgaatggagtaatggtgtgttcttctataccaaagacttgggatgatgatatagatgttattagctgtaaatctgtagccatataatgtctagctctctctacttttctcttggctcaaaattcttcgtccttgtaaacaacatatgctgtttctgttgttcatgtaaattcacaagcttgtctgaatcacacaaattattgtcttcctgattcataaacaacaacccccaattcaaaatctcaaaattgggtgataaaaagagttatacgaatgaacatactaatctcacaatgtggttggtctgcagacaagagtgattacactacagtgaagctacttctacattagctgtatttcaggaggaggcaaaaagctatgcagtttttgtatctcctccttgagttcttctagtttcttcaactcgttgttgcttgataatgaggtctctaacatccgatagactggttcgctcacacaccttcctctctctactgtttgccatgagcactcaaatgcatcattggctcttcttcgagcacacaaagcagtggtaaggagttccaatgcgtggccatgagggcaataccctttctccaacatatacttccacaggtctaatcctaaatttacttcaccgttgtgacagaacagcttcatcagcatcactatagttggtgttttcggaaccagagatctttccttcattttctggtaatactcacataccccattgaatccaaactcttttgatttcatcattccgataaacatcgagtggaaagttacactgtcaggctcaattcctttctcttccatctccttcatcaccttaattgcaccactcacatctccacacttcattagactactcatcaaagcattataagctccgcaatcaggtgttaaacctctcttggaaatttcatcgaacagttggcgtgctttgatcttgttcctagctacaccagacccatggatcaatgtagtgagtatctgtaccgtgatatcaaaatctagacgatccatatcttcaaagagcctcaaagcttccccaaagtttcgttttttgcagaacccatcaattctgataccgtaagtgacggaatttggtttaaatcctcgtttcaccatttcatgataaaacagctccgtggccgtaacatcaccagcttccttaaaccctagaagtaaaatgttcatcgtcttcacatctgggttaaaccgagaatgcaatttttcgaaaattgatctcgcttccttcatctctcgctctgtgcaaaacgctcgtagaagaatattgaactcatcgacaccaaatttctttctgaatatctctttctccatcttcacgaaagcttctagagtttcttcataagacccaaatttagcgattttgcagagaagtatgctcatggacttgaaactcaacaaattagggtagtcttttcgcacttccgccattaaagcccaagcttgatcgaaataacgcatccgtgcgagaatgtgaagtgttttctcgaaggaatcagaggtgggagaagatttagagcttttaagtgaatacttgaagaattcgagagctttaaggccattggaatgagcagcgaagagacgaccgagaacttctgatacaaattccggtgacagagaagataaagggatgtgtttggcgagaatgggttgaatcggatgatttgggaatggatgaccattgatgattattgtaatacgttcgatctctgttctgtttatcgatgtagatgataaagatgaagatgatgatagtactggagcaagaagacgacgatacgaatcggaggagatcttctgaagcatttttctctctaccagaaaattagattccgagaagaaatagaaaccttaaagagcccatttcagttaaccgaagcgaaccgaaccgaaattatgccgaaggaactgaaatcgaacatcggtttattttggttattaaaacttgttggacggctccgcgagcttattcatcggcatctgtagagaaggaaggagttcgtttggcagcgacgcaaatttcatgttttgaactggtaatttctcattaatccacgcaaagatatgtgagttcttgttcgtgtatgaatttacttgcggttctctagctcaaagtttggttcactttgtatatgcacggaaggtgtttgttgatttgtctgtgaaaatctaatgattccatttgtgatgaaattgtgtcacatagtgtctgtggggagagttttagtgggtttttatctttaaatgtttttacttgtattctcgcgttagatattaggtttagcctaaacctgcagctgcacgaagcccgcatcctcaaactggtaaatttcaacctcaaggcaattttctctgttttgtttctggggttttgagatttttgctttatgtgtgcttttatctgtgatttaagcattgttgtttcatagattagttgtttggttctaacctgatttaggaatagctagagaattagaatcttaagtatctgagacacgtttcgagattattactttgactggaatatgtgaatgtgacgagaagtgtagttaatgaaaattgagctcgtttcatgtgtgtgcttgttctctccttgatatcagagaatagcttcttgttttaggcttaactaggatgcaaactagggcaattcaggaccaccaagattcttaaggtctgtgaaaattctcatcttttgatttatacagagtgtagatgtctatctttgcagagtcagctttgaatcagtctatatgtcaagactctatattgctgaccttatgcgtatatcttgtgctcacattgcttataggtcacagaatatagttcccacaagtcacttctaagactattgttgaaaaatctaattgatccttattctcatcatttgattgaccgcagagagtagatgtctatctttcattggttctggggtcaagttgcatgattgattagttaaaaggttagacttctccgtggtaacataagtgttacaattcatattattattataaggtttaagttgattgtgattgtgaatgaagtcatgcagtttttttttatatatacatagatctaaaacacttaataactaatcaccgttggaacattatataacatacataagagactgactaactgagtaatttaaggtgcagtctatgaactaacttgttaggaatgcttgaaaggatgttagttttgatgtgctttaacaagtctcttaccttgttctgaatgcattgatgattgctaattagcctaaaccgtttagggaccaattcgaaaggtttggtgaaagagaactccttaggttaacttgttgcattcaactagtgattggccaatgtgactaagatttaacaagagcttaccgaaaaaatcgcttgtgaacttgtcttactgcagtaaagtgaagtaagcatatcacttctgggactataggaagttgggaggtggtgatactctagtagcaatgacaacggaaacggcaaagaagaagggaactccacagatttttaaaacagataaggcacaaaaacttgtaagattttttcctcattgaagcacaaaaatccttgaatcaaatctagatatttcttgctttcatataatttggtttcaatctcaccgctttgagtttttgcggtttgcaggctgagaagtgggttgccagtatgacgaggcccacagaggatgatcctattgagactgcacaagaagaacgaccacacaggtgaacgcaaatatctttttacatgtaaatttgcatttcgtttgagaaaatgaagctaaatataagtatcgttgtaacccctgtgttaggcttggacttggtgctcaagtgtcacgacaaacaaagcgtagaccttcagacgaccctctcgatcagaaactagaagccaagtttgctgcagtgaaaagaaaaaatgcaagattggttgcagaagctgctggttctagtaagaatgccggtgatgacagtgaggatgatgatgaatcagaaagcaaaagccaagcatttggtaagaaaaagaaaaatacaagtactcctcattagagtttgtgatgtactatagtaaaaagtcatggccttgtatttgttttgattgttggataagagctaaaacgcataattgtagttctattggaacatggtgcttggtaaaaaaacatcatctttgtcttatttaagttcaagcctcatgttataccactctatagttataactcatgcacaactctcttggccgagtaaaactacagatgccactggaaagcaaaaacagagtatggaagtgaaagaaacaatataagagattctgaagtctttgtttatgttaaaaaagctgtggttgtgccactgcacaagaatgtcaagagatttgaccatggcagtggcaatgaaactgtacaggatagacaaaaggttaaaacaaagagcctcatcacaggttgtcgctgctgggttcctgcatcggttcaacttgaaccatgtctctgcagctcatgatgatctcttctactaactcatcaaggatcatttcacttgtataggaacctagacaaccgatctcaaaccggagatccatccagcttccagttctagccatgtctttttttactatctgatctaaagtgtgagggaaaggcaaaggttggagatgccagtaaactccttcttgtgctactttagctgcgatttccatgtctgagatcaactggacctcaggtttcacgaatgaaatccaaggcccgggattgaattcattccaacagaagtccataagaacttcattgatacagtcgtaaaggagattcttatcgtcgcagagctgtgtagaagaaaaaactatgccatctgttagttctagctcaagaagctgttccgagtaaaagggccttgttaaaagctcttcccagctcaaggctgcagatttcacaacggcttcaatgtatgcaagtgtcaattccttgtcatctatggttgcttcgacattgttgtccttctctggttttggagaatcaacttcatcgaatcttatacagagtggttgcatccgcattccagctaaatgagaattaagaaacagtagtaagaaaccaagttctgatgaatcaaccttgagctgatttttaaagttcttaaatacctgaactgaaacttgtgcttgttgttgggctactgtcatcatctgtgaacaaagtctcgagcacagacactggacttaactttccctgcgcatcagtggcagtttctttgcattcagtcaaccttactgaacaagttgttggagattctagaggagaagccggcgaatgcgcttggtggttcaacatttcctggaacaagataaaccatgaaatctaaaatttcattcaagaaaaacagagaatgtattcacttatcacatacacaagttgtctaaccttttctacatcttcatcaacattttcgacttctcgggaaacggaagagctacaagtttcagataatggatctatctcactctcctcatcattgtctatattctcagtttcattcccatagtctgaaaccatttagtaacattttgtcagaacaatattaagatctgctggggatagaaagaaacatctcaaaaagagaagaagaaacaaatcacctctaggaacagagacatcaatggtaaataatgtatcgtcgtctttatccgaatcttcatcaatcagatcatttgtagctgaactggtttctggtgtttgtagaatctctggttgctcagttgtctgacttagagtactaaccaaatcatgtgccgggatcaatctaggactgtctgctggtgaacagaactcagggagagaaagaatcttccccaggattcttggcacttccttgtctggtaaattcacatctatatctccatttgcaagcatttcagacaagtgtttcttggctgcaatatataagccagacattatcttctttgaatcttcgcttgagtagatagtctcctctttaccatcctcggtcgttctttcgtcacagaacggttcttctttatccgaaacatcatgcttctcctctgatttactctgtatctcttcttgcgtagaacagttttggctcctcttatcaacagaaacatcacatgacttctttccaacagcagattgtagtcttctcttgactaaaccgataaggaagcgagaaaatgttctcccggttttggacttgttggcagtagaatgcagtccagttgaagaatcaacatccaaagtatttggaccaggtttcaaaaccacaattgtttttgcaacttgagatctgtttctcctctcttctgatttccatttcctgctgaaaaagttagctttcctcttcggtatcaccaccgcctcttgcttcgatactacttcaggcttttcttcttctactctcttagaatctcccaaggtttgagcatcttcatttgaaagcttcttcttgaggaatgattcttcttcttcagaacccaaaacatgaaaagcctccaataagtctttacaggtttggatctctccttctttctgagctatcaaccgtttgataatctctttgaatttctcttcagattcatcaactagactcttacaaacctcagtctctacatgttcatcaccggcgaccgaaacatggatatcttcctcatcaacactctcatgagagctctcacaagaacatgtaatctgcttcatttcattacctgcataaatgagtaatatataggatcagaagactgattataacaagaatctttgttagacttagacacataatgttaaacgaaacaaaaacctgaaactcgtttgcttccacgtttgttatccatcaagagacgtttctggttagatccaaagagactaatgaacacccacacacatcctataccattgataccttctctttcaagatttctccgacaatttctctccatttaacagttgacacttaaatagagaagtggtaaggaaactgttaatacaagcaaagaataaacttatgtctgaatataataaaaaaaaaaaagattcatcatgcaaatgatctgttaaaactctgttttcatgattttttctcatcagtcacacaaacgcattgtgatcattactgttcataattcgatacctttcctttacaagcaagagaaccttttttttttgggatcattgtgaagaagaagaagaaaaagaggtataaagattaaagacaataccttttagaatctgatccgatacttgggaaaatctgataatgcagctggagagagtgattaataagaaactttcttttcaactttttagctgttttccacgaaaacaaaaagaagaagaagaagaagaaagctttcaccggattttcccggaaaacgttcgctgaatttgcggctttaatattttataaaacgaaataacgaagctcgaaacacgagggcaaatgttgaacacagtagtgtctcaatttagatgaagaagacccatatttctctcaccagaatatgaaaaccactgtgaagattaaaatagaaaagagtgagagaaaatcaatatagatttataaaatggagaattaggcataaagtcacacgagttgaataaattactagaaaaaggaccaacctagattatgagtaaatgtgctgattgtatcaagtttcatcatttacacatctacgaagccaataaagagtaaagatttttcttttctttttttgttggggttaatattgacgtggttcacttgaaagtgcagcagccattggaaacctcgcccataactctatatacattatatatacaaatcattgtcattgtatatacatgtgtattagtgtcttcacgagactgtaatgaatgtgtatagatatatatgtatttatacgtatatggacagagaaggtttggtgatgcaggtaggtaggtaatggtcctctagaaggagtcgtcgcatgcagcgagtagtaccgtacataactaatgtgtcgggaggggtattatggtgatttcgttcaacagaaattgcaaagtcaaaatagtttatatcaaagaaaatcaaaataaaaaaagggagagagaaattagaataaatgaagaaaaagtcaaaaatgacattagagtctcttccactatggacaaatttttctttgttaataatgacacacatatacacgaacacgacatttcgattctgagcataacatttttaaaaagttatgtgtctattaagaaattaattatgctgaagcatgaagttgatggtttaatggctaattctcctatgtcaccaacctagtttgttagtttttctggtcacacggaagataaaacgtatggtttataatccataaaaaaaagtctattttatatgttctgctatagaatgcgactaaatagggatgtgaaaaagagtccgttacgatgttaccatccaacgattaaaccaatatatagctctcttttgactaatggcgattaacgtttgataactaagagattacatattgtaggttatcatttaaaaacaaattcggagttatcattttgttacatttctatttttgacgtaatatcattttgttataatgttatttgtagttcatcttctgtcgttacatatacgtttgtagtttgtagaaacatgtttgcagacttgcagtatactaaactaatatagtaatatattatataaagaaatgataatgacaaattgacaataataatatttctcagagtcatactaaaatattaaaataacttaatttttaagagtttcgttcatgcatggcttttttgctcagtcttgttcatgttcatgttccaaattaagataccaaaaaaaaatacacttgattttataatccttaatttttatttactgccccgaggtttgcctaccctctaattacaccacacacatttagatcagactctaattaagaaaaccaatagaatagcacttaccaaactttctttatgatatgactctgacatatactataattagcataatgcaatatacaacgattttcatctttgtttagcccactagctaatcacctactcattaatttttgttttttctgtatgcagatatatatgtatatagttttgttttgtacttatatgcactagtagttataatgtccatttacgtaatgtagtaatctattgaaattaatatttgccgacagttttatacaaaacacacacaccctgaaagttctataatataatgaacatctacatctttgaaattgagctaagaaggtttattttgtattagcgatcgatgattaagaaatatgcgttgagatacttgaagataatgaacgacgacgtttgtctttgcatctgtacgtacccaacaattaatattagaaaacaaagtatcactacaaagctgtgtaatagtaaagagataccaatcattttatttttcataggattctcctccaaacccataaccttttcagtttgtcttaaaggtgcattagaaggataaattaaaggtttcattttctttttatagagcaaactatgtctagttcaaaaagagagactaaaatgtgtctgttaatctttctgtacttttttgtagattgatgacatatatatacataaacgaaatcatccctaggtttatatatgtattaagtacatcaaataaaatttattgttttcatttaatttacataaatgaaatttattgtttggtggctgtaaatcaaataaaatcatcacaacaatttttgcatcgcacgaaaagttatctagtgcgacataataaagctaattattggggttttaaactattttgcatgataaattattggagtacatgtttatatataacactgaagctcgtcttcgtttttttgggtcaatatttccaaatcttcgaaaaatactaaaaactttgatatcctaaataagtttatctatctatctatctatctatctatctatatatatatattattctataagtttataattacttttgataaaacagttctaacataacgttttaaaccctatacatacaattttgtagaagaaaaagtcgtaatacatatatttcaatttccaaagtcgtcatattttaccaaaatttcgataaaataataattaagtactttaatttatatgtcattactaaactgaaatccatcagcatgcaatgatacaatcacacaaccgatgtgggaacgtaacattctggaaatgttaaaaatgcgtaagatttttctgttgaaactaaaacatcactagtgggcggtttcatattattagcactattaattatcactttatacaaattttgttttttaatgctttattcggtccacgaaaattggctgtttgcgaagtaaacacaccaataaattaacgccatctccttatatatcagataatgtgattgatcaataggtacttaacaactaactcaccccaaattgtatatcaattaattagttgtacataattatttcaaattaatatagctatatattatattcatgttgttcataacaagcttaaaagattatggaaaaactgtacattgattgagttaggttcgtgcgatgtatgtctcttactaaaagaagtattaagcgttgtatatcatatcgatatatccacaaaacattattaatatcatgattaaagaaattatcatatcgattaatatctaataagcattaaaatatatgtgtctgtgtgtctagaatgattaggaatttatgatattttaaacccataaacaagacaaaaactaagaaatggacgaagagagtcatcatagtctcaccaactatatatgatccaaccatatatgttttaaactttaatctttaacctaaatatatttactgggtgacagaaagcaagattatgtgtattggacacgtttttatattttatctttgcttaacacaaaattatcacgcttagatacaacaaagttgaatacaaaccggaaacaccaagggattgtttataaaatttcgcagaagaaatatctcttttttggatgaatggctcataaaattatttatgggtagttttatacttctattatattttgaaaaaggatcttggaaaaacattagctcaaatgattcctttgaaaatagaaggtcttgggccgcacattttaatgctactactggcctatcccagacggcccaaaattataatgggcctaaaataaacaaaattctcttctggcccattgaccacattcgaaccccaaaagttaaaatcacaaagcaaaaggggctgacgttaaaactcaaaagttaaggggctaaacttaaaataaaaagctaatggactaattttaaatctcaacgatacagaacatgactaaaaatcaaaaccacaaagttcaggaactaaagctaaaatcacaagtttagggactaaaattattatctaatgtgatataccttggttgactttaaattggtgatctcagtgatgatgtatttgcttgaatactttatatgtattagaatttagagtgtaaataactgaaactaaaataaatttctctgtagatgaactaaacttgtggacgttagctttgtttgctcaatgaacttgaattaaacgaaactcttaaagcttatcacgcgggaaaggagacgaggtcgttaaaaaaagcggttgactgttagacataaccgtcaaaacatactaaaagttgacgacatcaaacctgaagaaagaacgcctgaaatttatctttagttacatctgaaatttcgatctcactttcgtaatgttgacatttctcttgacaatgacagagaccatcactttgagattctttggtcggctctcaatattgaaagtcagaggcttatccattattatctgattatgcttctgcggtaaggcttttaaggaacacggtttcgtgattagatacgtgtttgtcttataattgaaaccttttcctcttatccctatatatactatatacttggctcatcaaatactctgttagatcaaatcttaatttatcgcaaaaagtattctgttcttttttatatggaccggagtcacaatgacattaaagattccgatccaagagatggtgaaaatggttggctctttaagatctcatggcatcgatatccctgaatcaatggaaatcaacaaaaaagagaagatctatgtagcagtgacagagaaagatctagaaagcaagtctagtctcgtttgggcgatacagaacagtggaggcaaagagttttgcatcgtccatgttcatcaacctatccgtaagtaattaaacatccacaagaatctttttatgcagaggttaaggattatttggttaaatttggagtatcttgtgttcttgatttcaagcgggggagatgtttcacgagcagaaattgcgtctctacagaaaagagaaggacaaagcacataagaattcggagaagtaccttcaaatatgcaggcaaatgcaggtatctatatccttacttcttatccatgtgttttgatggtagaagagatgtttggttttaaatttccagtcaaattgtgaattaggtcactgcagagatcatatatattgaaacggattcggtagagaaaggtatcctccaattgatatctcagcgcggagtcaccaaactcgttatgggagcagcagctgatagacactattcaatgtaagtggctaattagtgtagactactaagactttttgtgatctaatatatagattaaaaaacgttgattttgcaggagaatgagagacttaaagtccaagaaagctatttacattcacagagaagcgcctgccacttgtcttatatggtttacgtgcaacggttacctaatttgttcaaggtttggctaattaagtcaattcttcatcttcttttgtgttagctgaacatactagtcactgttaaggactggtctttgagttttacttgtctcacaagtcacactacaatgcagggaagctagaagagcaaataacttgtatctagaatgtgcatcgtcaaattctttgagtcaatccgacataactagaggaactgaaagtatagttaaagatgatgatcatctgatcaaattagctgtcacagaagctgaggcttcgaaaaggaaagcacgctttgaggcatgtaagcgcgaagaagctgaaaaaactgcagttgatgcactcaaaaaggtatgtaagttccttttaacatgtttttttagcttagaagtatcaaacttttctaactcttatctataacaaaaacaattgtaggctaaacaatgggaaaatgtgtattttgaggagttgaagcagaggaaagaaacagagaaggcactgaggaaaagaaatgacgaacttgaaaagatgagatcagaatccgagacccaaataaccgaatcttatactgtgattagaaagcttcaagaaaagaacaacttatcaatggaaacgtttagaggaatcagagaagaacaagaagagttgaagataaagcttagagaagtatcaaagctgaagggtaagcgcgaggaagaggaagcttctacctctaaccaccgtgaaccgccacaatactttatttgtcccattacacacgtgaggaaacgttacaagatcaatgaaaactaaatgatcaaaatgttataattttaagaaaagaaaaaaaagaccaacagttttgttatttgtaggatataatggaggatccacatgtagcagctgatggatttacatatgaaggagaagccataagccgttggtttgagagaggacatgagacttctccaatgataaacaaaaggcttcctcacacgagcttggttccaaatcttgctcttcgatccgcaattcaagaatggcttcaacttcgtgaattattgaacagaccctctgcttgcagagagatataagtgattcgccttaatcagagtgacaaatttatcataaatcaaaacattttcaaattttgtcaattcaactttctctaattaatgtttatattattatatcaatgcacagtgcgttacaacacatatgcttcttagttaataggagttgttactctatcactagtattattggtttggtcactcttttttggggtggttacgcacgtatatactaaatatagactatgatctacttagattttaatatttgtgatgaattgtgaactataagaatatagtggttatgactgaattttttcatagatttaataaatcttccctcatggcataatattagttagttaatatatagtggtatagtggtcactattttatttgttaaatttggtttgatgcattggtggtcattataacaagcataaaaaaacactaaagctagtattggattcatccacgtttttgtaattttgttatttgatggaataataataataaatttagcctgaatcttgcatagatttagttctcttaattaatcttccctcatgacgtttaatataacggaaatatggtggtttggttgcccactacacactatatattcctttgatgccgtgatagtcattataacaagcacaaggaaaaacactaaatcgtagaagaagaaaagaaaaacaaacaagcaatggattcaacagccaccgttgcaagtgatcgtcttagtcaactaaactctttcgaggagactatgacaggcgtgaaaggccttgttgattccggaatcaaagaggttccagctatgttccgtgagcctccagctattttagcaagccgaaaaccaccactagctttgcagttcacgatcccaaccatcgatctgaacggaggagtagtgtactacaagaatcaagattcagttacacggagaagcatggttgagaagataggagatgcagcggagaaatggggtttcttccaggtggttaaccacgggatcccgctcgacgtgctggagaaggtgaaagaagggattcgcgcgtttcacgagcaggatgctgaattgaagaaacggttctactctcgtgatcacactcgaaaaatggtttactatagtaacttggatctcttcaccgctatgaaagcgagttggagagataccatgtgtgcctatatggccccggatcctcccacatcggaggacttgcccgaggtttgtgggtaaggtttccatatatatatgagcttaattatttatagctaataacatttttagaaaggtttttaaaaaaaattttgtattattttttaaaaagtgaattatagaatttttaaagtaaatccatttgtatttttcatgaatctgaattgatgttttgatatgtggcagggagattatgatggagtatgcaaaggaaataatgaatttaggtgaattgatctttgagcttctatcagaggctctagggttgaataattctaatcacctcaaagacatggattgcagcaagtctttggtcttgttcggccagtactatccaccttgtccgcagcctgaccatactttaggcttaagcaagcacaccgatttttcttttctcaccattgttcttcaggggaatctcggtgggcttcaagttctccatgataaacaatattggatcgatattcctcccgtccctggggctcttgtcgttaacctcggagatcttctccaggttaaagaagtgactttttagctttgtaacattttagctctatctttgttaggaatatcatatatgaaataatatggaatttaaagtagtaagtaaaagatataggctagttatgatttgaatggagatgtgagttgattttttatttgaatttgtgcagcttataagcaatggcaagttcataagcgtggagcacagggtgatagcaaatagagcggctgaaccgcggatttcagtgccatgtttcttcagcaccgtgatgagggagagccatcgagtatatggacccataaaagagcttctgtcagaacaaaaccctcccaagtatagggacaccaccatctccgagttcgcaagcatgtacgcgtctaaagagatcaatacctctgcgttactccgtttagagatctgatacatcgaccaaagaaaatgtctttgtattaaataatgttcgtatgcgtttactcaatttcaagatttgagacatcgagcaaataaactgtacctttgtaacgtaatgtgtgtatgtgtgtcactccatgcacggatatgtcgacgtaaaacatccgtaaaatgtacccttgtaacataatgtatgtatgtgtgtcactctatgttaggatatgagacattgaccaaataaaatgtctttgaaaacacacaccgtttggcccattgacccactcttcttttttgtttttacatcaagtagtcattttttgtttatatggtgctagttataataacccattgctacctaatcttttaatacacacgcacatttgttttaagtatattttaatgatataatcgacattgattacttccttgagtttgattaggtcgttgacactcaaagggcttaaaagtaaaaccgcacaagaaaataatacatatacatgacattccagaacgaatattcgaaagaacagagtaacacaagaaagggatgacacatgccttaatcggatcttttctttcttaattccatattattaaaaacattttccggagaagaagacaaaaccaaagctt

SEQ ID NO: 115 - DNA, 95993 bp, Arabidopsis thaliana
gaattcgagagctttaaggccattggaatgagcagcgaagagacgaccgagaacttctgatacaaattccggtgacagagaagataaagggatgtgtttggcgagaatgggttgaatcggatgatttgggaatggatgaccattgatgattattgtaatacgttcgatctctgttctgtttatcgatgtagatgataaagatgaagatgatgatagtactggagcaagaagacgacgatacgaatcggaggagatcttctgaagcatttttctctctaccagaaaattagattccgagaagaaatagaaaccttaaagagcccatttcagttaaccgaagcgaaccgaaccgaaattatgccgaaggaactgaaatcgaacatcggtttattttggttattaaaacttgttggacggctccgcgagcttattcatcggcatctgtagagaaggaaggagttcgtttggcagcgacgcaaatttcatgttttgaactggtaatttctcattaatccacgcaaagatatgtgagttcttgttcgtgtatgaatttacttgcggttctctagctcaaagtttggttcactttgtatatgcacggaaggtgtttgttgatttgtctgtgaaaatctaatgattccatttgtgatgaaattgtgtcacatagtgtctgtggggagagttttagtgggtttttatctttaaatgtttttacttgtattctcgcgttagatattaggtttagcctaaacctgcagctgcacgaagcccgcatcctcaaactggtaaatttcaacctcaaggcaattttctctgttttgtttctggggttttgagatttttgctttatgtgtgcttttatctgtgatttaagcattgttgtttcatagattagttgtttggttctaacctgatttaggaatagctagagaattagaatcttaagtatctgagacacgtttcgagattattactttgactggaatatgtgaatgtgacgagaagtgtagttaatgaaaattgagctcgtttcatgtgtgtgcttgttctctccttgatatcagagaatagcttcttgttttaggcttaactaggatgcaaactagggcaattcaggaccaccaagattcttaaggtctgtgaaaattctcatcttttgatttatacagagtgtagatgtctatctttgcagagtcagctttgaatcagtctatatgtcaagactctatattgctgaccttatgcgtatatcttgtgctcacattgcttataggtcacagaatatagttcccacaagtcacttctaagactattgttgaaaaatctaattgatccttattctcatcatttgattgaccgcagagagtagatgtctatctttcattggttctggggtcaagttgcatgattgattagttaaaaggttagacttctccgtggtaacataagtgttacaattcatattattattataaggtttaagttgattgtgattgtgaatgaagtcatgcagtttttttttatatatacatagatctaaaacacttaataactaatcaccgttggaacattatataacatacataagagactgactaactgagtaatttaaggtgcagtctatgaactaacttgttaggaatgcttgaaaggatgttagttttgatgtgctttaacaagtctcttaccttgttctgaatgcattgatgattgctaattagcctaaaccgtttagggaccaattcgaaaggtttggtgaaagagaactccttaggttaacttgttgcattcaactagtgattggccaatgtgactaagatttaacaagagcttaccgaaaaaatcgcttgtgaacttgtcttactgcagtaaagtgaagtaagcatatcacttctgggactataggaagttgggaggtggtgatactctagtagcaatgacaacggaaacggcaaagaagaagggaactccacagatttttaaaacagataaggcacaaaaacttgtaagattttttcctcattgaagcacaaaaatccttgaatcaaatctagatatttcttgctttcatataatttggtttcaatctcaccgctttgagtttttgcggtttgcaggctgagaagtgggttgccagtatgacgaggcccacagaggatgatcctattgagactgcacaagaagaacgaccacacaggtgaacgcaaatatctttttacatgtaaatttgcatttcgtttgagaaaatgaagctaaatataagtatcgttgtaacccctgtgttaggcttggacttggtgctcaagtgtcacgacaaacaaagcgtagaccttcagacgaccctctcgatcagaaactagaagccaagtttgctgcagtgaaaagaaaaaatgcaagattggttgcagaagctgctggttctagtaagaatgccggtgatgacagtgaggatgatgatgaatcagaaagcaaaagccaagcatttggtaagaaaaagaaaaatacaagtactcctcattagagtttgtgatgtactatagtaaaaagtcatggccttgtatttgttttgattgttggataagagctaaaacgcataattgtagttctattggaacatggtgcttggtaaaaaaacatcatctttgtcttatttaagttcaagcctcatgttataccactctatagttataactcatgcacaactctcttggccgagtaaaactacagatgccactggaaagcaaaaacagagtatggaagtgaaagaaacaatataagagattctgaagtctttgtttatgttaaaaaagctgtggttgtgccactgcacaagaatgtcaagagatttgaccatggcagtggcaatgaaactgtacaggatagacaaaaggttaaaacaaagagcctcatcacaggttgtcgctgctgggttcctgcatcggttcaacttgaaccatgtctctgcagctcatgatgatctcttctactaactcatcaaggatcatttcacttgtataggaacctagacaaccgatctcaaaccggagatccatccagcttccagttctagccatgtctttttttactatctgatctaaagtgtgagggaaaggcaaaggttggagatgccagtaaactccttcttgtgctactttagctgcgatttccatgtctgagatcaactggacctcaggtttcacgaatgaaatccaaggcccgggattgaattcattccaacagaagtccataagaacttcattgatacagtcgtaaaggagattcttatcgtcgcagagctgtgtagaagaaaaaactatgccatctgttagttctagctcaagaagctgttccgagtaaaagggccttgttaaaagctcttcccagctcaaggctgcagatttcacaacggcttcaatgtatgcaagtgtcaattccttgtcatctatggttgcttcgacattgttgtccttctctggttttggagaatcaacttcatcgaatcttatacagagtggttgcatccgcattccagctaaatgagaattaagaaacagtagtaagaaaccaagttctgatgaatcaaccttgagctgatttttaaagttcttaaatacctgaactgaaacttgtgcttgttgttgggctactgtcatcatctgtgaacaaagtctcgagcacagacactggacttaactttccctgcgcatcagtggcagtttctttgcattcagtcaaccttactgaacaagttgttggagattctagaggagaagccggcgaatgcgcttggtggttcaacatttcctggaacaagataaaccatgaaatctaaaatttcattcaagaaaaacagagaatgtattcacttatcacatacacaagttgtctaaccttttctacatcttcatcaacattttcgacttctcgggaaacggaagagctacaagtttcagataatggatctatctcactctcctcatcattgtctatattctcagtttcattcccatagtctgaaaccatttagtaacattttgtcagaacaatattaagatctgctggggatagaaagaaacatctcaaaaagagaagaagaaacaaatcacctctaggaacagagacatcaatggtaaataatgtatcgtcgtctttatccgaatcttcatcaatcagatcatttgtagctgaactggtttctggtgtttgtagaatctctggttgctcagttgtctgacttagagtactaaccaaatcatgtgccgggatcaatctaggactgtctgctggtgaacagaactcagggagagaaagaatcttccccaggattcttggcacttccttgtctggtaaattcacatctatatctccatttgcaagcatttcagacaagtgtttcttggctgcaatatataagccagacattatcttctttgaatcttcgcttgagtagatagtctcctctttaccatcctcggtcgttctttcgtcacagaacggttcttctttatccgaaacatcatgcttctcctctgatttactctgtatctcttcttgcgtagaacagttttggctcctcttatcaacagaaacatcacatgacttctttccaacagcagattgtagtcttctcttgactaaaccgataaggaagcgagaaaatgttctcccggttttggacttgttggcagtagaatgcagtccagttgaagaatcaacatccaaagtatttggaccaggtttcaaaaccacaattgtttttgcaacttgagatctgtttctcctctcttctgatttccatttcctgctgaaaaagttagctttcctcttcggtatcaccaccgcctcttgcttcgatactacttcaggcttttcttcttctactctcttagaatctcccaaggtttgagcatcttcatttgaaagcttcttcttgaggaatgattcttcttcttcagaacccaaaacatgaaaagcctccaataagtctttacaggtttggatctctccttctttctgagctatcaaccgtttgataatctctttgaatttctcttcagattcatcaactagactcttacaaacctcagtctctacatgttcatcaccggcgaccgaaacatggatatcttcctcatcaacactctcatgagagctctcacaagaacatgtaatctgcttcatttcattacctgcataaatgagtaatatataggatcagaagactgattataacaagaatctttgttagacttagacacataatgttaaacgaaacaaaaacctgaaactcgtttgcttccacgtttgttatccatcaagagacgtttctggttagatccaaagagactaatgaacacccacacacatcctataccattgataccttctctttcaagatttctccgacaatttctctccatttaacagttgacacttaaatagagaagtggtaaggaaactgttaatacaagcaaagaataaacttatgtctgaatataataaaaaaaaaaaagattcatcatgcaaatgatctgttaaaactctgttttcatgattttttctcatcagtcacacaaacgcattgtgatcattactgttcataattcgatacctttcctttacaagcaagagaaccttttttttttgggatcattgtgaagaagaagaagaaaaagaggtataaagattaaagacaataccttttagaatctgatccgatacttgggaaaatctgataatgcagctggagagagtgattaataagaaactttcttttcaactttttagctgttttccacgaaaacaaaaagaagaagaagaagaagaaagctttcaccggattttcccggaaaacgttcgctgaatttgcggctttaatattttataaaacgaaataacgaagctcgaaacacgagggcaaatgttgaacacagtagtgtctcaatttagatgaagaagacccatatttctctcaccagaatatgaaaaccactgtgaagattaaaatagaaaagagtgagagaaaatcaatatagatttataaaatggagaattaggcataaagtcacacgagttgaataaattactagaaaaaggaccaacctagattatgagtaaatgtgctgattgtatcaagtttcatcatttacacatctacgaagccaataaagagtaaagatttttcttttctttttttgttggggttaatattgacgtggttcacttgaaagtgcagcagccattggaaacctcgcccataactctatatacattatatatacaaatcattgtcattgtatatacatgtgtattagtgtcttcacgagactgtaatgaatgtgtatagatatatatgtatttatacgtatatggacagagaaggtttggtgatgcaggtaggtaggtaatggtcctctagaaggagtcgtcgcatgcagcgagtagtaccgtacataactaatgtgtcgggaggggtattatggtgatttcgttcaacagaaattgcaaagtcaaaatagtttatatcaaagaaaatcaaaataaaaaaagggagagagaaattagaataaatgaagaaaaagtcaaaaatgacattagagtctcttccactatggacaaatttttctttgttaataatgacacacatatacacgaacacgacatttcgattctgagcataacatttttaaaaagttatgtgtctattaagaaattaattatgctgaagcatgaagttgatggtttaatggctaattctcctatgtcaccaacctagtttgttagtttttctggtcacacggaagataaaacgtatggtttataatccataaaaaaaagtctattttatatgttctgctatagaatgcgactaaatagggatgtgaaaaagagtccgttacgatgttaccatccaacgattaaaccaatatatagctctcttttgactaatggcgattaacgtttgataactaagagattacatattgtaggttatcatttaaaaacaaattcggagttatcattttgttacatttctatttttgacgtaatatcattttgttataatgttatttgtagttcatcttctgtcgttacatatacgtttgtagtttgtagaaacatgtttgcagacttgcagtatactaaactaatatagtaatatattatataaagaaatgataatgacaaattgacaataataatatttctcagagtcatactaaaatattaaaataacttaatttttaagagtttcgttcatgcatggcttttttgctcagtcttgttcatgttcatgttccaaattaagataccaaaaaaaaatacacttgattttataatccttaatttttatttactgccccgaggtttgcctaccctctaattacaccacacacatttagatcagactctaattaagaaaaccaatagaatagcacttaccaaactttctttatgatatgactctgacatatactataattagcataatgcaatatacaacgattttcatctttgtttagcccactagctaatcacctactcattaatttttgttttttctgtatgcagatatatatgtatatagttttgttttgtacttatatgcactagtagttataatgtccatttacgtaatgtagtaatctattgaaattaatatttgccgacagttttatacaaaacacacacaccctgaaagttctataatataatgaacatctacatctttgaaattgagctaagaaggtttattttgtattagcgatcgatgattaagaaatatgcgttgagatacttgaagataatgaacgacgacgtttgtctttgcatctgtacgtacccaacaattaatattagaaaacaaagtatcactacaaagctgtgtaatagtaaagagataccaatcattttatttttcataggattctcctccaaacccataaccttttcagtttgtcttaaaggtgcattagaaggataaattaaaggtttcattttctttttatagagcaaactatgtctagttcaaaaagagagactaaaatgtgtctgttaatctttctgtacttttttgtagattgatgacatatatatacataaacgaaatcatccctaggtttatatatgtattaagtacatcaaataaaatttattgttttcatttaatttacataaatgaaatttattgtttggtggctgtaaatcaaataaaatcatcacaacaatttttgcatcgcacgaaaagttatctagtgcgacataataaagctaattattggggttttaaactattttgcatgataaattattggagtacatgtttatatataacactgaagctcgtcttcgtttttttgggtcaatatttccaaatcttcgaaaaatactaaaaactttgatatcctaaataagtttatctatctatctatctatctatctatctatatatatatattattctataagtttataattacttttgataaaacagttctaacataacgttttaaaccctatacatacaattttgtagaagaaaaagtcgtaatacatatatttcaatttccaaagtcgtcatattttaccaaaatttcgataaaataataattaagtactttaatttatatgtcattactaaactgaaatccatcagcatgcaatgatacaatcacacaaccgatgtgggaacgtaacattctggaaatgttaaaaatgcgtaagatttttctgttgaaactaaaacatcactagtgggcggtttcatattattagcactattaattatcactttatacaaattttgttttttaatgctttattcggtccacgaaaattggctgtttgcgaagtaaacacaccaataaattaacgccatctccttatatatcagataatgtgattgatcaataggtacttaacaactaactcaccccaaattgtatatcaattaattagttgtacataattatttcaaattaatatagctatatattatattcatgttgttcataacaagcttaaaagattatggaaaaactgtacattgattgagttaggttcgtgcgatgtatgtctcttactaaaagaagtattaagcgttgtatatcatatcgatatatccacaaaacattattaatatcatgattaaagaaattatcatatcgattaatatctaataagcattaaaatatatgtgtctgtgtgtctagaatgattaggaatttatgatattttaaacccataaacaagacaaaaactaagaaatggacgaagagagtcatcatagtctcaccaactatatatgatccaaccatatatgttttaaactttaatctttaacctaaatatatttactgggtgacagaaagcaagattatgtgtattggacacgtttttatattttatctttgcttaacacaaaattatcacgcttagatacaacaaagttgaatacaaaccggaaacaccaagggattgtttataaaatttcgcagaagaaatatctcttttttggatgaatggctcataaaattatttatgggtagttttatacttctattatattttgaaaaaggatcttggaaaaacattagctcaaatgattcctttgaaaatagaaggtcttgggccgcacattttaatgctactactggcctatcccagacggcccaaaattataatgggcctaaaataaacaaaattctcttctggcccattgaccacattcgaaccccaaaagttaaaatcacaaagcaaaaggggctgacgttaaaactcaaaagttaaggggctaaacttaaaataaaaagctaatggactaattttaaatctcaacgatacagaacatgactaaaaatcaaaaccacaaagttcaggaactaaagctaaaatcacaagtttagggactaaaattattatctaatgtgatataccttggttgactttaaattggtgatctcagtgatgatgtatttgcttgaatactttatatgtattagaatttagagtgtaaataactgaaactaaaataaatttctctgtagatgaactaaacttgtggacgttagctttgtttgctcaatgaacttgaattaaacgaaactcttaaagcttatcacgcgggaaaggagacgaggtcgttaaaaaaagcggttgactgttagacataaccgtcaaaacatactaaaagttgacgacatcaaacctgaagaaagaacgcctgaaatttatctttagttacatctgaaatttcgatctcactttcgtaatgttgacatttctcttgacaatgacagagaccatcactttgagattctttggtcggctctcaatattgaaagtcagaggcttatccattattatctgattatgcttctgcggtaaggcttttaaggaacacggtttcgtgattagatacgtgtttgtcttataattgaaaccttttcctcttatccctatatatactatatacttggctcatcaaatactctgttagatcaaatcttaatttatcgcaaaaagtattctgttcttttttatatggaccggagtcacaatgacattaaagattccgatccaagagatggtgaaaatggttggctctttaagatctcatggcatcgatatccctgaatcaatggaaatcaacaaaaaagagaagatctatgtagcagtgacagagaaagatctagaaagcaagtctagtctcgtttgggcgatacagaacagtggaggcaaagagttttgcatcgtccatgttcatcaacctatccgtaagtaattaaacatccacaagaatctttttatgcagaggttaaggattatttggttaaatttggagtatcttgtgttcttgatttcaagcgggggagatgtttcacgagcagaaattgcgtctctacagaaaagagaaggacaaagcacataagaattcggagaagtaccttcaaatatgcaggcaaatgcaggtatctatatccttacttcttatccatgtgttttgatggtagaagagatgtttggttttaaatttccagtcaaattgtgaattaggtcactgcagagatcatatatattgaaacggattcggtagagaaaggtatcctccaattgatatctcagcgcggagtcaccaaactcgttatgggagcagcagctgatagacactattcaatgtaagtggctaattagtgtagactactaagactttttgtgatctaatatatagattaaaaaacgttgattttgcaggagaatgagagacttaaagtccaagaaagctatttacattcacagagaagcgcctgccacttgtcttatatggtttacgtgcaacggttacctaatttgttcaaggtttggctaattaagtcaattcttcatcttcttttgtgttagctgaacatactagtcactgttaaggactggtctttgagttttacttgtctcacaagtcacactacaatgcagggaagctagaagagcaaataacttgtatctagaatgtgcatcgtcaaattctttgagtcaatccgacataactagaggaactgaaagtatagttaaagatgatgatcatctgatcaaattagctgtcacagaagctgaggcttcgaaaaggaaagcacgctttgaggcatgtaagcgcgaagaagctgaaaaaactgcagttgatgcactcaaaaaggtatgtaagttccttttaacatgtttttttagcttagaagtatcaaacttttctaactcttatctataacaaaaacaattgtaggctaaacaatgggaaaatgtgtattttgaggagttgaagcagaggaaagaaacagagaaggcactgaggaaaagaaatgacgaacttgaaaagatgagatcagaatccgagacccaaataaccgaatcttatactgtgattagaaagcttcaagaaaagaacaacttatcaatggaaacgtttagaggaatcagagaagaacaagaagagttgaagataaagcttagagaagtatcaaagctgaagggtaagcgcgaggaagaggaagcttctacctctaaccaccgtgaaccgccacaatactttatttgtcccattacacacgtgaggaaacgttacaagatcaatgaaaactaaatgatcaaaatgttataattttaagaaaagaaaaaaaagaccaacagttttgttatttgtaggatataatggaggatccacatgtagcagctgatggatttacatatgaaggagaagccataagccgttggtttgagagaggacatgagacttctccaatgataaacaaaaggcttcctcacacgagcttggttccaaatcttgctcttcgatccgcaattcaagaatggcttcaacttcgtgaattattgaacagaccctctgcttgcagagagatataagtgattcgccttaatcagagtgacaaatttatcataaatcaaaacattttcaaattttgtcaattcaactttctctaattaatgtttatattattatatcaatgcacagtgcgttacaacacatatgcttcttagttaataggagttgttactctatcactagtattattggtttggtcactcttttttggggtggttacgcacgtatatactaaatatagactatgatctacttagattttaatatttgtgatgaattgtgaactataagaatatagtggttatgactgaattttttcatagatttaataaatcttccctcatggcataatattagttagttaatatatagtggtatagtggtcactattttatttgttaaatttggtttgatgcattggtggtcattataacaagcataaaaaaacactaaagctagtattggattcatccacgtttttgtaattttgttatttgatggaataataataataaatttagcctgaatcttgcatagatttagttctcttaattaatcttccctcatgacgtttaatataacggaaatatggtggtttggttgcccactacacactatatattcctttgatgccgtgatagtcattataacaagcacaaggaaaaacactaaatcgtagaagaagaaaagaaaaacaaacaagcaatggattcaacagccaccgttgcaagtgatcgtcttagtcaactaaactctttcgaggagactatgacaggcgtgaaaggccttgttgattccggaatcaaagaggttccagctatgttccgtgagcctccagctattttagcaagccgaaaaccaccactagctttgcagttcacgatcccaaccatcgatctgaacggaggagtagtgtactacaagaatcaagattcagttacacggagaagcatggttgagaagataggagatgcagcggagaaatggggtttcttccaggtggttaaccacgggatcccgctcgacgtgctggagaaggtgaaagaagggattcgcgcgtttcacgagcaggatgctgaattgaagaaacggttctactctcgtgatcacactcgaaaaatggtttactatagtaacttggatctcttcaccgctatgaaagcgagttggagagataccatgtgtgcctatatggccccggatcctcccacatcggaggacttgcccgaggtttgtgggtaaggtttccatatatatatgagcttaattatttatagctaataacatttttagaaaggtttttaaaaaaaattttgtattattttttaaaaagtgaattatagaatttttaaagtaaatccatttgtatttttcatgaatctgaattgatgttttgatatgtggcagggagattatgatggagtatgcaaaggaaataatgaatttaggtgaattgatctttgagcttctatcagaggctctagggttgaataattctaatcacctcaaagacatggattgcagcaagtctttggtcttgttcggccagtactatccaccttgtccgcagcctgaccatactttaggcttaagcaagcacaccgatttttcttttctcaccattgttcttcaggggaatctcggtgggcttcaagttctccatgataaacaatattggatcgatattcctcccgtccctggggctcttgtcgttaacctcggagatcttctccaggttaaagaagtgactttttagctttgtaacattttagctctatctttgttaggaatatcatatatgaaataatatggaatttaaagtagtaagtaaaagatataggctagttatgatttgaatggagatgtgagttgattttttatttgaatttgtgcagcttataagcaatggcaagttcataagcgtggagcacagggtgatagcaaatagagcggctgaaccgcggatttcagtgccatgtttcttcagcaccgtgatgagggagagccatcgagtatatggacccataaaagagcttctgtcagaacaaaaccctcccaagtatagggacaccaccatctccgagttcgcaagcatgtacgcgtctaaagagatcaatacctctgcgttactccgtttagagatctgatacatcgaccaaagaaaatgtctttgtattaaataatgttcgtatgcgtttactcaatttcaagatttgagacatcgagcaaataaactgtacctttgtaacgtaatgtgtgtatgtgtgtcactccatgcacggatatgtcgacgtaaaacatccgtaaaatgtacccttgtaacataatgtatgtatgtgtgtcactctatgttaggatatgagacattgaccaaataaaatgtctttgaaaacacacaccgtttggcccattgacccactcttcttttttgtttttacatcaagtagtcattttttgtttatatggtgctagttataataacccattgctacctaatcttttaatacacacgcacatttgttttaagtatattttaatgatataatcgacattgattacttccttgagtttgattaggtcgttgacactcaaagggcttaaaagtaaaaccgcacaagaaaataatacatatacatgacattccagaacgaatattcgaaagaacagagtaacacaagaaagggatgacacatgccttaatcggatcttttctttcttaattccatattattaaaaacattttccggagaagaagacaaaaccaaagcttcttgtctgaaacgaaccagccattctaaagatttttacaaacaactttttcccgagaaaatctcaagtttgaggaagcgagaaagagcaacatggaagaaaaagaagaagcaggagtgatggatgagagaatatatgttgcactagggagagaaatagccaataacaagtcaaatctggcatgggtattagataactgtcaagggaacaagatctgtatcgttcttgttcaccgacctcctcaaatgattcctgtctgtaagttcccccaacaactcctatattgtcatctttcgaacggctttatacacgaaacagagctcttaaagagtttgactttcaatgatctttctcttactttcacagtgggtaccaagttcgatgctgcaacggtagatgaagaattagtgagagcatacagagagaaacaaaaggcgaaaacagacaagattcttgatgagtaccttagaatttgcttgcggaaaggggtatgtatatttttatacatatacataagggatatgaagtttaggccattcctaaggagattggtattgtaggtccaagcagagaagctgtgcgttgagatgaactcgatcgagaaaggaattgtgcagatgatttctgagaacaaagtcaggaagttcatcatgggagcagcttcagacaaacatttttcaacgtattgtgtttttaggcttcacgcttgtgtttctgcttcacatgcttctttaacaggtatagaatttgacatttgaggtgatcaatttgcaggaaaatggaggatttgagatcaaagaaagccatcttcgtctgccaacaagcttctgctacttgtcatatacggtttacctgcaaaggatatctcatccatacaaggttcaagccagaagcctcttttctttatctgtatacaaacagcagatgatgctttaacgttgatatctgtgcaatcaatgtagggaagctagaatggatgaagtccgagctctctcagctctactatctgactttcaacggcttgtcacctcacaaagtagcgccaatttagatcaagacagtggaggttcaaagaggaaaagtgagcatgaagagggggaggaggaggagagaacatcacgaaccagctcttctcggtctgctagtacattgtcatactttggaggatctgaggcttcctcaagtgtaagtgtaatggaagagatatcaaaccgttcatctccaccatctttaccggtaagtcctgcgatcctgaataagagagaatcctttctttttgtttctttcctttgcatttcacctggctcatgaaatgcctaacggtgctgatccaccagtgcagcggaatgggactgggcatgataaccttcctgattaactccaccaaactctggcaaaggcttgcaattcaaaaccataagcattgtgaatgaccccaccattacctgaaaagctacataaagaagacgaggacaagaacataaagctacaaagatcttgatcacatctgtaaatacaatgtagctcatatttgtaaacccaattgtgaggagaagctgctttgagtcctccactctccttatcttgtgaatgtgaggctttgtaaattatcttctttatattattcttgcgttaaaattcaaagaacaaaaaacagaaagataaccaacaaatgagcccaccaactaaatgctttaattaaaagttgtatacaaaaggttgatcactaaaaaggagtaaaataaaaagaaaacaaaactgcatcctacctctcggattaactgagaagaaagagagaaagcagattgtggaaagaaagaaaaattacaggatgacacacatcaaccgccggtgaccggaacaccactttctctctaattgcttacattctagtggggatctcaccaaaactgttccagccattgggctagcgttttcagcttcacttgtgtcctgcagctggaccttcaaagttcaaaacgcatgcaaaccaaaccatctatcatcagtcatctaaagctgtgttgaagactcaagtgtgtcctatttctaaaaccgataggtagttcagttcaacagcaccttgtgctacactattaccataaatgtaaagattaaccaggaaaaagggatagcatgtacctgtcaatcgtcttgaagttccgttgccatttatggaaaagttcacaggctgcctttcttgtcctatcgatagaacccaactagagttcaatctccgagcaaaatcctctacctctctgtattaacatattaacataaggttcaataatttaatttagtttcacttaatggccgcacaattcgatgtagatcttcatatttagtctagaagccgaggtttgtagaaggtatatttggagaggtgactgctatcaattattatttcagcccaaaacgaatacttcaggtagaaaaagaaccacttacctatcaagcagttccttcaaagctggatcaatttcatcatctatataaccatcttcaaactcagtctttggcgtaaaaatgtcatcttccatactaggtaagttagacacatctcccaagcaggacgcagtattgtcaacaatctcagcactttgtgatttggaatcaagattatgtaaatcctaagaagaaggaacggactcagtaaattgattactaccaaccagaagcaatcagagagaaactagtttaaaccttttccaaagcttcacatgttccatttgaagaaccattcttctgttccttccttttcttgttcttctttttgctcttggaagtctttaccaccttgggatctgtgaacataattatccttctctagagtgagagttttaaaaggaagtagaaaagagaagaccaagaaggaacgctaacttaaaactcacgcatcatatatctcaatcaaggatacccaagatatcaaccaggatttgagcatcaaatcatctaataactcggccataaatgcataagcaagagtatactgataatgaaaatgaccaataaaaagcccaaaaaattgaagcacaagacggtgaaaatctcatatcaggcactcacttagcaactagaaatgagtcttacaaaaattaatagttgaacgtgagcatcaaaatagactccagagtccagacatgaaccaatatgtggtaccatcaacatgaatttagacaactcggagcagaaaaagaaaaaaggatcatgacatacagagagatatgaagttaagaaaagtacctctgccattaataaatgataacaggtcatccactgaacgctcatcgacatgttcttcgacctcgacactctaggacatggaaatagccataatatataaactagtgcaatagttcattcttacaaaccaattcctgacttaatattaagtaaaatgctcaacacacctttagtttctctctttctttcaattcttttcttttctttgcatacaatctattcaacaatcgaatccgtggatcatccattgtgttctttagaggctctaatttctcctcctgataaatcgtaacaaaaagctaaaatatagaagcagatgggaatgacgcctcctaaaaagagatgatttgggcacaacatacctcagtaaggtcatcaggcaaatgaaatatttcgcgtatctcctcaggggtttttccctcaataattcgtgcaagggcacgactagtaagatcaaccaacggcttcaactgcaaactgtcagcggctgaggtcaactcacagagcctctttgtatccatccggatgaatttttcatcataaactttacgttcctaaaaagtaacaaagagctctatgaaaaaaaggcataggataatcgacatgtcattaattgtttcaaatttaataacctcaagtaaaccttatttgaacgtccaggtacttgatgaaatctgcagtaatcaaaaatcaggcttaacatggctggattgactcgctgtggaagagatattgcgtagttcttagaagacccaacacccttctgtattacttcttgacatatcatgggacagaacattgcaacctcttgttccacttgttggattgagccatcagcagtttcaagccatatataggatttcatcatctatgttgataccacaaaaaaagtaattagtcttggtgcaaggtaaaagctcaactaatcattcaaaaactccatacataaagaagataacacttaaaataaaacactattactatgaaaagaatctatgatgtaacgagtaggtcatgtaaacgcatatgataagaactactagagactaattaatcacgattaatataaaacattgacgcaaatggttgctaacttgttatgtatccaaaatctaaccttgctagtacatttgagcaaaatatctaacaatactaaccctcactctttatgataactaacataggtccttgttgccataataagtaaacgaaatacatgtgagttagttagctatacgccaacaaaatccacattagttaaagtatcagagcttacctctggtttaatgatggccatttcaccttctgacattgatttatagacccagtcttcgggtataacgcttgtagagtatatatcttattacactgtcaagctctccaatatattggacagcgcccactataaaaagttgttatttttaagtcttcaaggttccaaatactgcacagaaggaggattatttcaggtctatgagcatcgagacatcaatctcaatcaatttccggaaacttaacactaaactgggtacaagagaagaaacaatgtattgatcataaatttgaaatcaaacttggtaaacactcagaaagctcgagattgaatctggcatctaatcaaaaatgcatcaaccaggtccacacaaactaagagagtctagattagtaagttcagaatcgattcaactttttctctttttgatggaaagtaagtttctctcgaatgtgaagaggcacctcaatcatgaattcgtaaaaccctaagcccagaaatgaagagagaggtgctaaataccaaaaatgaaacaaaagacagaggtgccgaaacttaaattgatacaatggagactgaaattaaaagaggaatagagtgaataccaacagcgagagagagagacatagataacattcaaatgatcaaacgatacaatcgaacaagtagcacacgcatagagagatacatataatggagaaacacgacgatgagaaagcaatagataagaagaatacaagcgtgtcgtaccttacgaccggaggagaagcaatgagtgacgatggtggaagaaagatttgaatctggcgggggataacggcgacggcggcggcagaaacagaccaagagagagagagagacaggagcggataagagagagaaagaagggcttaataatattttgggatttctttttaataattaagtttttctcgcgcaaaaaaaaaaaaaagacaagagagaaaatggagtgggttataattgccacgtgtacgagccgcgatggctcatggctcgagatgatgaaaatagaatctcagggttcgttggtggctgatgaagtcggtgaggctcttctagatggctatttctgtgaacctttctgtcttcactttctttctttcttattctcatttttcatttttttatttttttttaggttaggttaatttaatttctataaggtttttttatggtaaacaaatttattacaaacattctcaaaacaaatgctaggttaattaaacccgaatacccctatacacttcccatcgtcttctctatatattatccaatttctcaattatcactatgctcttacaaaactaaacaaattcattagcaacatatctaacctttaactaaacaatagtattagcatcatcgatttctgtttatgagagtttaatgaccgattcagtgactacatagctcaagcaacattcttaaccaaaccccgctaatgcttctcaatcaagttcttaaccaactgttttgccacccaaaaaaaaaacaattggggtattgagaggttccttgtagcacaagcaacattcttggccaaatcccgctaatgatgcttctcactcaagttctttaagaatcttatctattacactacaaaatctaaatgttcagtccaatgtttaattttttgtcgaaggaaatctctttctttccaagtacaaaacgttctctatgtaatcttagcggttcttctctgcaagtccgattcgtagtgttggaacgcagcatcaagagcctggtggagaaaacgggttaatatcactcagatttcaattcataaactggattacaacgcaatgtctggttttgctggttaaattggatcgatacaatgcgagtggaaaaaataagacttcaccaagacatgatgtaataaaactatctatgaattggaaggaagctaacctgttgcattggacgaactagtaaggaaacttgatgccggagatcagactgcaccgactgtttcattgcctggtttacattcggtataatattacggaaaccataaacactagaccatatgctgtaagtttcgactacaactctgcacctattcattttacccaaatttcatgtttgtgtaaatgcattcgtatgaagatataatgaactacttttctaacgcattactccgagaaaaagatttgaagaagaattccatagcttacatcgagtagtgaataagtattggacattgcatccttcagtttaccaacctgcatgataaaatataacatcctagtataagaatttcctctcagtgtaaataaatttcaatttgatcctgaagaatctatgtacatagcaaactctatgattggaagaatgtgaagtggcaacaacattaccttggtactaagatatgtcgttgttattgggtaagatgaccaaaaatgtctcactaattcttgtattgatgtccagtgctgtatatgagagaaaaaaggaaaaagtattgatgcatttgaggggacaacaatatccataggcattattaaccaaattacagtaatcagtatatattgagctgcttgttacttgggacattggaggatgtcagacttacatgtataacttcatccttagtggactttggtaatctgtccagaaagctctcttgcgggttcttcccgagaatatttttggcagttgagatagttcgggtcaacgaactgaaaacctggatagggtttagcaatatttagctcagggaacaaagcaataagccatggtttctttaggcagcatgcattttatattgagatagaatagcacctcaaaggaaacttcaggtttaatcaacggatcacttaatcccgtcattctaatcaccaaaatggattcttttagtaatccataagcttcatggacatttctttttgacgcctttgctcctctgggttcactgaggatgtttccttgttgagattcaaagtaatcacgagggtcctgattccaaacaagagaaggtacgaggatttacgcaccatctttcatcatcaacagtgtaaacctatttatcacaaaaagccaagaccttgatagagagtggtgctaatgggaagttttgtggtgcttgaagatcctccatttctgttgcacgggacattctctccaacctctcctgattagcgtccttggtgatttcaccatcagctttgcttactaccaggggtaatagacatggatacctaggtcagatgaatatgaattgcagcattggccattgatcagcatagaaaaagaaaaagataagtagagcatatcataatgaaacagcaaaccttgtttcgcccgtgtgagagcctctgcaacaattctcgtatcttcagactgaacatctactttccagtataaaagaataagtgagtatcattgtatactttaccaccaagaactaaaagcagagggccaaaatacatgtttatccctcatcaactatctgttgggaagtcatttgatggctattttttatactgttacacaaaacaccagatgaaacaatcagagttgaaagtgtttactgatgcatcttccttccaatacaacagcagcatgacgattaagatcttgtaaaagtgacctcttaagctggtcattctgtggttcaataatgtcattggtgccatcgcgctggatcccgtggtcctgagtgacaggaaatttaattaagcacaaaataaaatatgatccagcagaaaatgtgaataacctttcaaccaacatatagaaagagcaaaatgtaagttataagatcactgttttctggatactagcgttaggctaatataaagtaatggacctgagtgggagataaagcactaaatgaaattcaatttctaagcaagaaatagatcacataattcaaatatagtttacacagtccataatttacatttgtgagaacataaattttcttgattgaataacttataaaaggattgatgaaattctagaaaacaaaacatttgacacactgttacaagttgatgcttatcaccgtcagtattagtatcatctatggagcacaatgcttctcatgctactactacttctagggtgagacaatatgtaaacaccaacactgaaaaagccgatgagagacctattttatctgtggaaatttctacactgttaacttgaaattatcgtttcaataaaccttgatgcagaatgagttgatagttggcttaccataagatgggtgtagtcatctccctcgtcagcgtccatgtcaagagttggatcaacccgtctcatctacaaacatgacatttaaaataaatggttattggttagaccacaatcattatccttttaagcaaatgacatggaaataattaattataaaaaagaaatgaccttttgacgagcttcctgagccaatatctcgtcaggcttcagaaagacagcgagttcctcatcctcagcagcttctgctgcagctactgctgtattttttgtgctgtaaagatattctgctctaaaatattttgtccaaaagtccttttctgtcatctggcgtagaaaaataactacgaaaggcagttatgaatcattgtatttgatgattaaaccaataaacaaagatggtcagagtgctgaagtctttgttacctttttcggaacataatttatgaatgcctggcgaacagccggcttctcagcaaaaatctgaaagagttatgaagatatcatatgtgagaaaaggacagtagtatgaatgaagcagcatttagttaaaaatgtttttacttttcaattctagtttcccactggaatttgtaagttcaagcacatgatgcaacccgaacatctagtaatgaatttatgactcaatatatcaccaattgcaacttcaaccccattggccatataaacttatcccgaccctggaggatcgcgcttggattcaaattcagaaacttatatagcccttacatcaatgagaaagatagtgaaccagatagctaacctgaaaaattatctcagacgttaagttaaacgtcaccctattagtctgaaagatcaaaaattgaagagaggttaaaccagatgaaatgtcatataaaatttatcagcaaatggatgtattataccatacccggccatcagtagacggtttgatgcctgaaaccatcatgcttttgagccccatctgttgttttgactttctaatggaatctttaccaagtaatttctgcgatcagaacacagttgataactattacgattgagacttacgagaagagcaaaactgaaacatcaaggaaacaaacaaagaaccaaccttcctcgtagaccagaattcgtcttccgtcaggactttactttccacaaattgcttatgcaatttctgcaactcacttcattatcataatatcagaaacttttacccaaaaagaaagcaacttttataagtgattacacacctattttctcgaagaagcttgaagcgtagctcaaattctgccatactaagttgttcagcaggtgtcaagacaactagtttattaggctcctcttcacatttagcaagggccttagctgttcatagcacaattggttacagcaacaacaccacgaaagaaacacagaaaaaatacttaaaatgaatcaataacaccaaatcatggcacgtggagcttactgatgaaatcacgacaagcatgcatgtcaggataattttcaaactcaaagatatgactccttccctgtaataatcaaagacgaggaaacttcagtgatacacctatcaatattttttagccttgagcaaaaagggccgaggaaaaacaacctgcttgctggtcagattgagccaaggaggtttatttgatccttctttggtatatttctgacctgagaaatttaacatggcacaataatcatttagagaaattattcatgataaatctgaatgaacaatatggataatcaaacacttacttttgatgttgtgagtctgaactttaagcttcaaatctgatttaggatcatttgggacaaagagcagcatcacttcactctgagaacaaaaattggaagatcctttgagaaaaaaaccattgagtaaggaaacaaaaatagaaatcatatagtggcaaagagttaaagtattcttactaattcgagggatccaagagttcctggatccttcacaaagctcttgtatttgactcgcttctccattgatatatgcccaaggttctaaagcatggtaaaattggtggattaagtttgtgagccggaggaggtaaggagtgtcgacggcggaggaaatatttgaatctggcggaggagaacggctagcgtcggcagatcagacaaaaatagctaaataatttgggaattttgttaattttaagttcgagagataatgaggtggttagaaccacgtgtacgagccgtgatagctcatgtcttgagatggttcaacagttcacacccgaagttgatgagtctcaagagccacgtgtacgagccttgtttaaccgggcctgcgatcaatagtagtgttgttagcttaagcccgtatatgtatggcccatttattgtctcgagctaaaagtcgcaacttttttttattgtttttttttagtttattataggcagacgataacatttgtcttattaatttcatgttaggaggacattggtaattttcgcttgtttttttgtgtttggtcaatgaatattttttttttttatggagccgtgacgcaaatgggggtggctaggtggggcaaatgcaatcatgaatagcagccacaataaaattaataaattgatcgagtacatatgtcataagataaatggtcggttttggatatgtaaggcgccggcattaggtggtatgactccacgtatcttatcgtcgatgcattggacggctattaaataatcagtctccaacataaaaattccaaaatcacacttcacacattcttttatcatgtcatgaggcttaatgggtcggtctttttttttagtggctagtgattttagctgatgtttcaacattttggttttaagtgtttctattttgcagcttaaatatacatataaaaataataatttaaagattgaaggtcctcaaatcgtgtaaatgtggatttttagtttgagaaagtatctcacatgagccttttttatcattaattacttaattacagtgtcaaaatgattgataaggagttggaaaatactaggtggtaatcaagatggcccttggatgctacaagagcgtagggccatagggcccattccagaacaatatagcaaccactaagcatgtttttgttttctttaacattgtcttttctatttggcaattagtacactacttacgttttgtggtaggaacaaataatttgtaatcttggcacaaaccagtgctttgtaactttgatgatagaaaaaatttattcactagttcgataacgattatcaatcatcataaataaaaaaagttagtttagacgatcatgaagagagaaaaaacagaattattggtactatctcttaatttcccaactctgtaggtacactcattaatcattatggagaatgtcatagtcatggtacataatgaatgtgcatggtgcttatggtacagatgttcttaacttcttatcctggctggcaaacgccagatcatctcaactggaggatcatgttttgttcgtaacagttagtaactaaccaaattagtgacaatcatgagggattattaaaaacagacattgatctatttttgattagaaaacattactgataaaactacaaaaatagctggaatggagcattcaaaactctgtccaaagtccaaacggttaaattatcactgacccaatccaataattagatttatttagtaagtatgattactacgaagataacattaacaaaattttatgttattgtcaatttgtcatcatcgtctttattttttatttctcaactttctttgcattacatcttccaactatataattaaccactctactttctcaaatcccacactcagagaagaagaagaagaaaaaaaacagagctttacaatttctctctacagagatcgaagatatggaaggcaaggaagaagacgttagagttggagctaacaagttcccggagagacaaccaatcggaacatcagctcagagtgacaaggactacaaggaaccaccaccagctccgtttttcgaacctggtgagctttcttcatggtctttttggagagctgggatcgctgagttcatcgctacttttctctttctctacatcactgtcttgactgttatgggagtgaaaaggtcaccgaacatgtgtgcttccgtcggaatccaaggaatcgcttgggctttcggtggtatgatatttgccttagtctactgtaccgctggtatctccggtaagtcactctacttctccaagtatacgcctttttactgtaattaggtttccgagtgtttgggttgtgaaagaagacgataaagctataatcttgagaaaattgtgtttagatttatagcttcttagcctgaacttgttccatttgtatctgattcaagaaatctcagaaagctacaatcttggtggaatttgcagttttctaatatgaattgtgtcctttagcctaatcttggaatgtattttttttatatgtaactctcaggtggacacatcaacccagcggttacttttggtctgttcttagcccggaagctgtcgcttactagagctctgtactacatagtgatgcagtgcttgggagctatctgtggtgctggagtggttaaagggttccagcctaagcaataccaggctctaggaggaggagctaacactgtggctcatggttacaccaagggaagtggtcttggagctgagatcattggcacattcgttcttgtatacacagtcttctcagcaactgacgccaagagaaatgctcgtgactctcatgtccctgtaagttaccactccttgtaacatatctgctaatagcttcttgaaacaattgaaatgagtgaacttttaagctgcctttagtgtgactctcatgtccccgtaagtaaccagtccatgtaacaattgctagaaacaattgaaatgagtgaacttgaagctgccattagtgtgcactaaagactgattctcaatattggatttgttgcttaccggcttgagttttgtaataattgtgcagattcttgcaccactcccaatcgggtttgcggttttcttggttcacttggcaaccatcccaatcactggcacaggcatcaacccagctagaagccttggagctgcaatcatctacaacaaagaccattcctgggatgaccacgtgagtttccacacactatataccaaatcgcattccaaactcggtttcgagcatttttccctgacaatttcgtttttttttgtcgtcattccagtgggtgttttgggttggccccttcattggagctgcacttgctgctctttaccatgtggttgtcatcagagccatccccttcaagtccagaagctaagtaaaaacaagacatcaagtcctctggtttctggccttgtccttagttgcttctatagttctattgttgatctactacatgtatgtgtgcaatgtgtttatctatgtgccctcttaatgcaatatttgtaaacaaggaagaagttccaaaggagaattatttgcaaattatgatgtttaacatgtttattacagatcaaagatgtttaacatggatattggtaaacgagaacctatataaacccaaattaagatggtctatcaccgcttaaccggttaggtattgtaatggtattttaaacgtgtcagtgtcaccaacctcgcctaaatcctaatggaattgagacacagccaccaaaaaccatcagaaaaatggttccatttgtcaaatacttttcaacaaagcacgaagattccttgaccgatagaaaaaagtaaactgtataagaaaagaagttaaaaatttactagaaacaggtgtaagaagttgactgtaagtttgatcattccacgagtacgaataaaactctgacaagaacacttcacttaccacaaatccacaattacttttctcacatagttccaacaagcaacttgtattattatattcttaacaccaatggtaatggatgatgatgcaatgtatttgtctcgttttctcatccatttatatgattgctttcttctccacctcaccaatcactcctcctctaaacttttcttcactctcttgtctcttcaaacttcggttactccgttttagtcgacaacaatggcctctgtttcaaggaggttactgaggagagagacgatcccctgtttcagccacaccgtgaggaaactcttctccaccgttggatctccttcttttgctcagagactcagagatctccccaaagacttcccctctaccaacgccaaacgtgacgcctctctggtaaaagaacgaacaaaaaagaaaccgttttttttattgagtatctacaaaattgcgatctgggttgtagcaaatttctcgtctttcttctgatgtcgattaacaaattcgtctgtgttaacgttgtagcttattgggaaaacgcctcttgtgttcctcaacaaagtcactgaaggttgtgaagcgtatgttgcagccaaacaagaacatttccagccaacttgtagcattaaagacaggtgctttgtgaaatcttagtcttcaaatccttcaaaagcactagtagcaagtattgattttgttccatttcctgtctttagaccagctatagccatgattgcagatgcagagaagaaaaaactaatcatccctggaaaagttaatagcttttttcttttctcttagttaattctcaaattaatggtgaatcaagagtttcttaccctctgaatttgatgcttaattttcagacaacactgatagagcctacttcaggaaacatgggaatcagtttggctttcatggctgctatgaaagggtacaggattataatgacgatgccttcgtacactagcttggagaggagagtgacgatgagatcctttggtgctgagcttgttctcactgatccagccaaaggaatgggtggaactgttaagaaagcttatgacctccttgatagtactcctgatgctttcatgtgtcaacagtttgctaatcctgcaaacactcaggtacacttatgagttagagaaagagatctttttttattattattgtgcattctcatttgatctagagatgatgcttggaatgcagattcattttgatacaactggtcctgagatttgggaagatacacttggaaatgttgatatatttgtgatgggaattggcagtggaggcacagtctctggtgttggccgataccttaaatctaaaaaccccaatgtcaaggtgagtgatctctaagttctgaagaaatcttgtgaatatcaaaaaagtagattgcgtttgatcatgaatgtcttccaaatgatagatatatggagtggagcctgctgaaagcaacatactcaacggtggcaaaccaggtgagaattttgaatacttaaagactttgttagtatatcctcattgcggttgctgatggtagagttttgaactttgagttaggtccacatgctatcacaggcaatggtgttggattcaaaccagaaatcttggatatggatgttatggagagtgttcttgaggtatagtatacggctaaagcttccatcttttcaataatctcaactcttaaggcttatgttttgagaatacgttaacaggttagtagtgaggatgctataaagatggctagagaattggcattgaaagaaggtctcatggtaagtgttttgatgatgtacagagatagtttgtttgtttgttttctggtcgtaagtatggacaataacttgtaggttgggatatcgtcgggagctaacaccgtggcagcaattagactggcgaaaatgccagagaataaaggcaaactcattgtggtaagagaggacaagtgttttctttggtctttgttattgatctatgtgttatgatttggtcagaaattattgttttgtgtttattatcatatagacaattcatgcgagcttcggagaaagatatctgtcgtctgttctgtttgatgagctgaggaaagaagcagaggagatgaagccagtttcagtggattgatgaaggaagactgacactttaccaaaaatctcgggagcaaaagattataaaaagaaagatgtaagagtaataagtttgtgtttatattgttctattgttgatgtataatataatcacagtattgttgatgttgatcttggatattgaagatccaactaaataaagttcatcattttctgtttcaaatagggattttctgctggtaaattccgtctaactgagattttgctgatgtaacataacattttacaagtagagctataccgatttccaacaaaacagaggattggaaaatcattactcttttttgatgaaataaaacgtatacatttacaagcattgactattaaataaaagccataaatatactaacaacgactgagtagttgaccaatatatcacactcagaatcaacatttttgacttaataaagaaaataatcttcaactttataaggaaagtataatcttcatgatacgccctcgtggcaacagatcgaacggccacaaaacaatcttctgtgcttttgtaagctataagctccacgtgtcatttctgtaactgttctgatcatattcaaaacaaaaactttcagaagaaacctgaaaaaacctttcggagaaatctccggcgaaaaagaaccctagcgtcgagcggcgaagatgggcgtaattgatttgatcactagggttgattccatctgtaaaaagtacgaaaagtatgatatcaatagacagagagacgctaatgtctccggcgacgatgctttctcccgcctttactccgccgtcgaatatgctctcgaaactgttcttcaggttcgtttagatttctccgatttcgtttcgttctctgtatgtttttgttttgttaactgtaaacttgtgagggacgttatagaaaacagaggatttgtcgtctgagacaaacaaagcgaaagctgtggcgatgaacgcagagattcgaagaactaaagctcgattgcttgaaggaattccaaaacttcagaggctttctctcaaaaaggtctttttcttaatttttgttcgatgacctaattttctatcaaagtctgtgttggtgagaggttggttttgttgcatgtgatgataagaaaggagttgtttttaggtcaaaggactttcaaaggaggagcttgatgctaggaatgatttggttttgtcattgagagataagattgaggccataccagaaagctctgctcctgttgtaggtggttgggaagcttcaacatcgtactcgaatatcagattcgatactaatgtctcgggtattatataatggtttctctgtagtttgtgacctctgcgttataatattagtatgttgattaatgaagactttctcaattgtatcagatgacagaattggtagtgaatatttccagccaaccggagagtctgatcagtttaagcaagagtatgagatgaaaagaataaaacaggcaagtgagtgtgttgcttatttggtttatcattaggtctataacgatcgatttctaaaaacaagagtctaaattatctgtaagcaggatcaaggattggattacatagctgaaggactggatacactcaagaatatggctcaggacatcaatgaggttcacctataccgatattcttttctgcggttgatgttctggtttcctttattgatcctcttactggtacattacattacaggaacttgataggcaagaaccactcatggatgaaatagatacaaaggtttaattaactaacacttgtccctgatctgagttttgtttttaacgagatcgtctttaccgtttcttgattcggtatttatcattcagattgacaaggcagctactgacttgaaaagcaccaatgtgaggctcaaggatactgtaacaaaggtgatataactgatattgagatcgaaaccaatctcgttttaatatatagttaacctcattgcattctatttggtaatatagttgagatccagccgcaacttctgcatagacatcatcctcttatgcatactcctgggaatcgctgccttcatatacaagtaagtaaccttttttatttactcgctcttaatcttggagagttgaaatcttgctttcatcttctttatctttatttggcgattttgcagctctgtgaagtgaaagctggtgatgcctgtcatttacattacacatgtttatggtagagacaaaatatggaagtttcacttttcatctgtctattatacacccatgtattttaaaatatgcttattagttggtctaaataaaatagcaagtaaactccaatgcaaatctatagctatctcacactgatatctaaaagaaaaaatcattatttatataaaaaaaagttactctaaaagacattgcaaattcaagttcatgagctcacttcaagagaagaagaaatacatgacagatattacaacttgcatcacatccatcataattctagcaaaaaatccagccaggttaagatttgtttggtgatgctgattcagataatcagttcacgatgtgacttttaagtggagccaaccactacatagctcctgattcttattgcgcaactgcaagcaatgctctcggaggtgcttgtgctgctaactataacaatttacaaaatacattataaaacatatattcccataatattatattataatgttttgtatacgtgtgtgtgtgtggactacgagtctacgaaaatctaaaccaactcaaattgctttgttgtttgctgatagatagatagactattataaaagtagattctctagctagtacatgaaatctagaacagggcatgatatggattatagatgatggtgatttgtattggtcatcttttcaatcattacccaaatagtaaatgccactttcccccatttttaacctacccactctggtactcttcaattatctttctctatagtgaaagcatgtcttctcccttaccatcctacaatgaatctgatcaccttcagtcaaaataatgctacatcaataaaacatctgattaaaaacaaaaataaaacatctgattataaataggtattccagaacattaggactagaatttcagtttttcattttagattttctcttctgatttttatgtttatatataatttgtagaataatcatagtaactattacaataaataaatcagaaatgttcggttttcaagattttttggatttctggtatatttctattcaagtaaaataaattcattgaattattacgttagaattgactgatggatctgcagaccaagcatgttacgagattctgcctttacgcattaccatgatccattgaatttagatccttttggtaaaaaactaaagataaaaagatgactcttgtctttaaaatatttattaccataattaccaacaaaatttacagaagtgatcactggtcactggtcagagacaagttctgacaagatcttaactactcccggttaaaaatacattaataactcttagacttaattaaaatagcataagttactgtaaatggaaatttaaggtcataactttcaatctgcaaataaaccacttgactggattataaaaatgtaagactgaaatttatacttatggtattgattttggatattcttagcatgtaactcaatttttaattttctttttaactttcaaagtaaataaactactttttattttcctgtctcggtaatatttattgctcatctctcattcatatgtaaggagtatatacacacataaaagcgtggcaagtctaaatgtcagtaagaggggtgaaaaaagcaacatcaaaagtagaggggtgaaagtcaaaacaaaaaagaacataagggacacagaaaaagatagaaaagcgtggcttcttctataataattcggtcacgggacagtgaaaatcatgaacaccagaagcagcccatagccgttgattaaactcttcttgcatctcatctggaacaaacggtgttctacaaagtggacacgtcttctgatcatgatccatccaacggtcaagacagctccggtgaaatatatgtctgcaatttctcagccaccggatctcttgttctccttcgaattcgtatagacaaacggcgcagttttccggtagatcttcgccggaattcgttaactcttcgaatttgataaccggtaggatctctctaattaggagtgcggagaaaggtgagcgggtttcgggtattcgggtcgggtacgatgtgtaatcgggccaggtttgatccatttcgagaaaatctgagagacccaagaagcggaagatagagaagacgatggttctgatgaatccgagaatcgaaagcgtttgtacgaaaagcttcggtaagaaaacctctgtgtaacctacgggaaagcccatggagaaagctagggtttttagagagataataatgagtgagctctgttttttttcctttttttgaaaaagttgatttttttaatgtcatgaggagtttgatttatagaaatcaaaggaaggaagaagatgaaggaaggaaggaaggtacaggattcgtctaaacgacatcgtgtcgtgtaagattgattttgatagagttaactgactgtgacgtttgttatgtgaacgttccaatgaggtgaaaaagagtagaaatgggaaaagattgaagttggactgtgagatttggttctgtcaccaacattgttggatttggctacgtgcgtctctacagtataacttggttttttttttttgggaataaaagtatctgcaagttgcacgacgatcagcacacgtggtacgtgcggttgatgtggattgaggaattaattcgtcctatttttttataaatggaattacgttttttaattttaatttttgggattcgttgaatgttatttaacacgtgaaatttacactaggcagtagataaatagggttacgttctcggtattaggacattttcataagaacaaacaaaaaatagagcactaattatcattattttaaaagacattagtatatgaaaattttatcaagatcgttaactaatcttgtagtaaagtaagatcaaatggctgagcttcattccgtaaatcacacgtcaaagaggtctcatgcgttgtctctattagcatttatactggttataggaaaacaacaaatgtatttgaaaagtataaaattcttttgtaattacatatgataagctaagtagctaactactgtattaggttcttttctttatttaacaagtttagatatttgttttgtgattctatgttggcatcagtggaggtgtatatatcaaataatgcgagggatcacctaaaatattactatttctataaaccagttcattgcttttgtctttcttttttttttttggtaagctgcttttgtctttcttatatatataggaaactatgctctaatttgcactacggtttggattagtttcttattttgactacagtaatatagttaggattgcttctagttttgaaaaagatgataatatgttttgagatcggtacaatgtttaattgaaatatatatatttgatgatcaaattaaaggcatattaggttgagtaaaaacattacaaaagcaaaagttcaaaaaaaaaaaatgaagaaagcaaagagaaacgagagaagggtgtgtgtgggtcaaggaggctttaaagagatgattaataaagaagaggaatcaaccttatctatacccctcaccctcaatttcgaaaatgatagattatatatatacataattaataattatataaaagtagaaaaaagtctattgtttaactgagtggtggaccggagagaggtataggagacaagtcgtcggtggcaatgatccttccaccaaccggcaatggttcatggctcaactatgatcggagaaatgtcgtttttgcaatgaacatatatgttttgttatctataatcgtattttaaaatcaagtggtcgtatatatatactctaatacttatagtcatgtggaaattttttcataagatgtacaacttacttacgatgatatattcaaacttagtaggaatttatttggttctatagcctatatatagttgactcactcaaaaataaccagagataaataataaaattgatgttttttggtaatatttatgaagtatgggccttatttataatcacacgctgaattctgaaaccttataattagaaaacgcattcaaaaaaaaaaaaaaataacaataagaaaatctatatagcctagtagaacggtcacaaaaacccacaaaagtatcaaaaactcgtaaaccatcaacgtttgagctcattttgttgttatagtcaaaatcattcaaagttattttgacaagacgtattggtaccataataacgcattaatacacctatacatttataaattattttattagttatacacgatggtagtacaagaatacatgtattgtagtagaattttgtaatcaattaatgtcacaaaattcaaaccaaacttcaatgagaaaattcatgatgctcaactagtcaatgtgtatgttatacgacaaaaaaacatgcaatttgtcaattaccatcgatccaaaaaaaaaaaccctctaaaacgataagaggaacgaaataagtatggagaatggtgtgttgatttggaaatgttataatgaggccgagacagccacatggccctattgcttgtatgcatatcatctcatctcctacctctcccacacttctctttgtcatgtcactgtttaatttttgaatactcgcaccatctcgttctctggtcccatgatgcatcgatacgaatatacttgattgactgtttcttgtttgtttcataactatataccctactttaaaccctatttgatccaatattgatcttagatttaagatgatgtttcggtggaatatgaggttcaatcattgcttcatttgtaattaaataaaattttagatgatactgaaaaagtcacgacaatacagatttttttattacactataattgtttttcaaataaaaagattggagttcatgtattcagtctctgttagggtcttaggaaccttttgttgttgatattatacgataaagatataattagcttattctctatctttatgattcctattcctactgatgtctttatgaatctcataatttataggtcacataaaacatggctaatcagtgttttgctaatcataagattttatagatgtgattcgcaattttgtttcctacaaagcaggggtggttttctagatagaaagagataaacgtatacaatcattcgctataataatatatgatcgattaacaacgatgtttatagatatttaatcattttgctagtgagtatacagtcttagatctcgtcgtcttgtctttctcctacacgtcacatggtaccacttcatgtttctttttgcttggtaccactccatgtttttattatcaaattggatatagaaaaattgcaattaatttgtagaaggtacataaatgaggtcccgctccggcaaatgttaaagccgtagttattttcttgaaggcctaatgctatcagctgaagattaaaaaaagcccaaaaacatatgggctttggtattctttataagcccagtcacttggaatactagcttatattttctttctttaaaactcagttaatagttatgttcaaatagagagaaaatctaagatgtggtgggacgaagttgccacgtgccaatgagttgaccaatgaggaaactcagtgcgttatccgtagggataatcagataagcagaatctgattttgtcaccagagtgcttttatagattacacaacacacgttcgtttctttcttcttctaacacactctgagtcttgaaggtcaacaacgtcgagaataatggcatcatctctttgtgcttcttctgccatcgctgccatttcttctccaaggtaagctcatctttttctctcttcttatcagttatcatcacttgctatgtaggaatgagactaagatccttgtacagttgtacttaattagtttcgttaacatgactatgatagtgatccattgattgggatttatgatctagtatccgagaatgtgtgtgcggttgtaaaattagtgatccatcatccatttagattaaacgttgtgcgactattgtttgtgtgatccaaacaccgatctgccctatgtaataatatgaatttatgcatggttggtgttattgaagttgtgactaaatttttagggctatgatatatgtgcagtttcttgggtggtaagaaactgaggctgaagaagaagttgactgttccagctgtgtccaggcaagatgcgtcggtgcgcgccgtcgcagctgatccagatagaccaatctggttcccgggaagcactcctccagagtggctagacggtagcctccctggtgacttcggatttgatcctcttggtctttgtgagtatattttttttgttcctccttgcatgctttttaacaagttttataaacaaaattagactatatttataattttctgacaaaatttagacacatgtcagcatcggacccggacagtctaaaatggaacgtacaagccgagatagtccactgccgatgggctatgctaggagccgccgggatattcatcccagagttcctaacgaagatcggaatcctcaacactccgtcatggtacacggcgggagagcaagagtatttcacggacaaaaccacactctttgtcgttgagctcattttgatcggatgggcagaaggacgtagatgggccgatatcatcaagcccggtagcgtcaacactgacccagtcttcccaaacaacaaactgacgggcacagacgttggttacccaggtgggttatggttcgacccgttgggttggggatccggtagcccggctaagctcaaggagttgaggaccaaggagatcaagaacggaaggttggctatgttggcagtgatgggtgcttggttccaacacatctacactggcactggtcctattgataacctttttgcacatcttgctgatcctggtcacgccacaatcttcgctgtaagtgtgatccaaatcaaaacatatctttactaaatgttcataacgtcgacacgtttaattgactagcttttgtgtgtgtgttttttttacaggctttcacacccaagtgagacaacgaaaaagggttatggggaggtgaatgcgtttgtgtgtgatcatgtttgtacaaatatcattttgaacttaaaattattatgtactttatataaattgtggtcgaatgcaaattaaggttccccgtaacactcttttcctaactcaatgatcataagatgcttttacattgtcattcggagcataaaagagtccatcttaattgtttttcgttattgttgatatctaagcttatgttcttcttctatctctctctcttacctttctctctttccgaatatctctttctcacctttctctctctctcttgcttacctttttctaaatctctctttctcacctatcttcttttctctctctctcaatataacatgacaaatttaaatattgaaaatcaactgaaaatttgttattgtctaatgcatattcactaaagttaaatctaagatagtagttatacgttaattatgaacatgatttagcaattatacaacttccaaatagataaggtggaaaaaagtgaacacatgagtaaattgaagtttaacttgtaaatattttgtacagagaaagaacctctatcaattaacactcgataaattagtaatcactataaattacttattttttcagtctcgagttagatcaatgtaatatttaacatcatttgataaaataataacttgtttgaaaatctaatgtaactaaatagtctagtaatatcgtaaattaataatcattatcataaattaatataaacttatcaaacatcaaaattccgattacaaaaagaataaaagtttagttatgttattaattattaaaaatttagacgaaggtatactagttttgtaatcccattattaatagtctatagaatggtaacgggctaacggcgatggtgataaacggaagagaagagagagagctagggttggagaaagagacaaaagagagggactacggaatgcagaggaaagcttcggcggtgttcatagggtcgtagaaaggagaaaaaaaacagagagaaacgacggaaggcagaggaaagcttcggcggtgctcataagaaacccatggagaagtctagagtcggagatgttgtcggagaaaggagaaaaaaacagagagagaagacggaatgcagaggaaagcttcggcggtgctcagctcataagaaccatggagaaatctagcgtcggagagaaatacaaacacacaacagagagagagagaaagagagagcttacattgtgagatcagagcgagagcttccatccagagagagagagtgagagcttatatagatggttttccgaatatatagtgtgtgagaacgaagaaccatcttttgtttttttgtttttttcttaagtacttttatataaaaacacgagagagagagagagagcacggagaagagggagagagacagagaaagcaatggtaatgatcggaatatggtgcacggcggtgatgatcgggaaatggtgcacggaggagagagagagagctaaaaaaaacttacatagtagtacatgaaatttaattgtttattttttggggtttctatgaaatcgtagaaatattattttattaaatatgaaacttacaataaatattattttctttaacctagagaaatagtagagatacaagtggatattggatataaatacctctttatcaaagacattttatacaacacacatatcaatattaataatacaacggttgattaaagtcaaaaacaaaaaatcccaacccaaatttttttaagttcacatatgtgtagtttgtttagcgtttcagaattcttttcaaaccaagtaatccgactttatttttaactgactcgtttttttaattatgttttggtgtcaaaactaatcaacccatggaaagtatcaacccacatatgtggtttagctttttcataaatatacattttaatcatttcttgtttagttagtgacaagacatgttacttgtttgatgacaaatatttgtatctccaatttctaaatcttttagccaaatgaaattatatatttgaccaaaaaaataaaactaagaaaagtgaaagagtatgggggcatcagaatctctgtcatgtgagtactattttttgaacaagctaagtaacgtcttgtatctatttgatttttttttagtatcatatagcacgagtgtcttaatgaaatcgttattagcttcaataatactaaataaaatgtttactttcacaatatgtaaccgattaaattcgtaaatattttgtacgaagaaaggatctcactcgataaattagtaattactataaattaattatttttttaatctcgagtgagatcaatgtagtatttaacataatttaataaaataataatttggttggaaatataatgtaattatatagtctagtaatattataaattaataatcattatcataaattaatataaacttatcaaacatcggaaattcagattaaaaaagaacaaaagtttagttgtattattaattattaaaaatttagacgaaggtatactagttttgtaattctattattattactctatagaattaaattaatagtctatagaatggtttgagtaaaccgagaaatgagagagagttctccttgaaccaaggataatcaataattgattcccggtttattcgtaaaattagattcgtatcaccgaaaccaattatattcgcaaaattaaaatccgatcaacataaaccggtcgggcaattccaattttgatgctccgtttattgagcgtttattgatctgcgactgcgagatccatcttcttcttcttctccttcttcttcttccaacgaatgttcctatgatctctgtgtatgaacagaatctgtaatcagatccattgtagagagagatagccatttcaattcgaggtagccaaagatgtatatggcttacgggtggccgcaggtgatcccgcttctacctggatcgcagcgagtcgtgtaccttaagctcgccggccggctattactggtcgtttctccgtctcacctggagctttggggttcttctcaggtgctttatcatcatctctctgcatttcgtagtaattggagtctagagttggttaacttatatagctttttgtttgattttcccgcaattagcaacgagtgaggttgggaaagtatatgagagatgacaagtcgttgcgagaagaaggagagaatttgcaagctgtgtggagtccagactccaaattgattgctgttcttgtaagttcttagtctcactcttttcctttgctaatttctgctaattgtttagtcactatcaatctttatccagctgagaatttattgaattgtttatacaaaatcttgttattggatcttctccagattgttctttatgtgtaaggatgagaaaaaacatgtttttaggtttgattggttgatgatttcagacattctaaagcctctaatttcagtagtatcttatttgaatcgtttgatcaagatgcatgaaaattcggaacttgtgaaaaaaccagttttttgtatgtcttctcaccaattattttttgattcgcagacatcatcgttcttccttcatatatataaaattaagtttaccgataaaagagtaaaacccggagagagacaaccctcggagttgtgttttgcaaccatatctcttttgctaagtgagcaggtcccttttgctggcaaggacttgtctgtgtaagtgctttttctgtacgtgtctctgccgtgctcaacatttgccgtaggagtctacacagttaaaactctgggattataaatgtaaggccaattctttctctctctgcaggagcaattttgttagggacagcaaaactatgcttttgggactctccgatggatctttatatagtatttcctggaaaggagaggtaatgtacatctgcttcatctgcattgtttgttcttggggtttttgaattctttgtgcaagattcctgatttctcatgttttgtttgtctttgtagtttggtggagctttcagtattggctcccacccttctgctagcaacgatgatagactcttgtcctacactcttggtaatgggctagtctctggagtagcttcaccaacacttgcatctgatgataaattctctacaaaaccggctattgttcagctggaactttgcactcgttccaagttattgtttgtgttaaattcggatgggcagctagtagtatgctctgtgaataagaaaggtttaaagtacactgagagtattagagctgagaagaagttgggtggtgatgctgtttgtgcatcagtggcttcagagcaacaaattcttgctgtgggtacaagaaaagggatggtggagttatatgatctgtcacactcgatctctctcttgcgaacagtttctttgcatgactgggggtaagcaacttgttactatgaaaagggatggtggaattttgtgatgaacctttattttttaatatttgttttgaaaggtttgagtattactattcatctgagtagtttttattgtggtgttgtgtaaagaccataatatcatacttgtcatactacaactggaagtttatacgcctttggtagttttcaagttgtcttactgtgatttatttcatgcccttgatattttggctgcatcgttaataaaactgttttaaaacttgcagttattcagcggattacactgggcctgtaaataacattgcatggacgcctgataattctgcttttgcagttgggtggaagtcgagaggacttgcagtttggtctgtttctggatgtagattaatgtcaactgtccgccaaattggactgacttctacatcttcccctaaaattaatccaaaacaagactgtaaatacgaaccactgatgagtggtacttcagccatccagtgggatgaatatggatatagactatttgctacagaggaggcatcatgtgatagaattcttgcattttcttttgggaaatgttgcttaaatagaggagtttcaggaaaaacttatgttcgtcaggtaatgtatggtgatgatagactactcatggttcaggcggaggacactgacgagcttaagcttttacatctaaaacttccagttgagtatcatcatatccgttatccccttttgctcattcatcgtatcactttgaaataaatttcttatatatattttcttggtccaggtttcttatattagccaaaattggcctgttcaacacgtggcagctagcgaggatgggaaatacttggcggttgctggtttacatggcctgattttgtatgacgttaggtttaagaagtggagggtatttggagatgtcagtcaagaacaacagattcattgcaagggtttgttatggttggggaagattgtcgtaatctgtaacttcattgaagcttctgagacgtaagtcccgatctatattattagtttctaatcatggttcactggctatatttattaatgtttacaaggaagagaaagtgccttttaatagaaatgtgtttgctactcttccagacttttttacattaatgtgataaacgtttctgagcattttgtctttgaatgttgtttaatttcacgtgtatgttcgctaattattgcagatatgagctgcttttctatccaagatatcaccttgatcagagctctttactttgtcgtaaagtgctgcttggcaaaccaatggtgatggatgtttaccaggattatatacttgtatcttatcttccgtttatcatccacgtctaccatgtgaagatatatggtgaattgacaccttcaagcaaagcagatctacaggtagttagttattccggttcatttcttctctgcatcattttcagtaaattatactttttaacttccaaatgtgaacgcttgagttgcttttcatgcaccttaaagtgattaaatgacaaacagctttccacagtaagagagttgtccatcatgactgcaaagagccatccagcagcaatgcgatttgttcctgatcagcacccgagagaaggcgaattggatgaagataatttgtcttctgatttgtcagaaagggaaccctcaaggtaatcatcaatagagtagaatatcctttcagtttatgctgtcattctaattgcctttgtggtctccatagatgtcttatactgagaggaaatggggagctttcacttcttgatttggttgatggacgagagagggaacttacagactcagttgaactattttgggtgacatgtggtcaatcggaagagaagacaaatcttgtcgaggaagtatcttggctagattatggacaccgaggaatgcaggtaattcctctgcttcaaagctgcttgttatgctcacttttcttcttcttcttttttttttttttttttttcttttttctttttctcgttatagggttgccctgcccctaagtgtctgacagtaactctctgtttgatccctgtcttttgtaactttttttgatttgtttaacgctgagattctatattataggtttggtatccttctctaggggatgatccttttatgcaagaggatttcctgcaggtatgcatgctagtagagtccattttcaccgccattggtggcttatctttttgttctgatttttattgtctgtaacattattgtttgacgacattgacattcaaacacatccctcttataaatttctaattttttcattgtttcaaatgcatttttattatgttccattcttcagctggatccagagttggaatttgatcgtgaggtgtatcccttgggacttttaccaaacgtgggcgtcgttgttggagtttctcagagaatgtcattttcggcaagcgcagagtttccgtgttttgagcctacaccccaggctcagactatactacattgcctgctccgtcacctccttcaggtattgttggtcctggcttctcttttcttaagttagaatgatcccttctttcttcctttattcatttctcctttgcaattttttttttctctcagaatcttattctgtttttctcttattttggacagagagataaaaatgaagaggcgttactcttagcacaattatcggcagagaaaccccacttctcccattgtctggagtggcttctttttactgtttttgatgcagagatttctaggtatccaattcctatcaatctttataacgtatctctgttctttgtaatttatacttaaccttcttgtcttgcttcacctaattgattttttgtactgaacatgtggcttccaaatttcaaggccaaatccaaacaggaaccagatttcaggacctggacatcttaaaaagttatcccttttgagaaaagcctgtgatttaataaaaaatttccccgagtactatgatgtggttgtgaatgtagccagaaaaaccgatgcccgtcactgggctgatttattttctgctgctgggatatcaacaacgtatgtttctctatctctgtgtttggcttttgtttcttgtaacgtgtatgaaactagttttgtttactgtactagacacgtgagcagttagccgttgctaagatagcaaacttcaccaatcttgcctgctctttttgttgagtaaactgtattctgtgctacgaaacttgatattctcttttgggttctagattgtttgaggactgcttccagcgaagatggtatcgaactgcagcttgctatatccttgtaagactcagaagcccttaaccctcgagtatgtttagttaaataatgttgtatcaataaaactgcagtcttctgtttgttactaggcaagtagcagtgtcaattgtcatttgattaaaatctcttgggacaaaaaaagcgcatggagttactattatagaacactgaagaaatctattaggttatgtttcaaatcgtacactaagtatagaaatggtgcaggtgattgcaaaactagaaggtgttgctgtcagtcagtactgtgctttacggctattgcaggtaatttcggctgtagcatgttgaatttatatctttcgagtcctttcttgtcaattttgttctttctgttcttaagaaagtttatttttatatttgcaggcgacacttgacgagtccctctatgatcttgctggagagctagtatgtatttgatgttcttgttgtttgtttaaaatgggcaattcaaagcttaaatcctaactaatgatgttattctatgacaattatgctgttaggtgaggttcttactaagatctggaagagacattgagcaggcgccaacagaatcagattcattatcgcctaagcttctcggttttcttatttttggctccagccacaagaaatcatcactcgataagaggtggaaactacaactctgattgtagtttttgattttctagagtgatacaactgtcttctgatcaagatttatttgtaaaacgtgaccctaaatgtagctcctcgttcaaagagcaaagtcctcatgttgcttctgtaaagagcatacttgaaagtcatgccagttacttgatgtctggtaaagaactttcaaagcttgttgcattcgtcaaaggcacccagtttgatattgtggtacgtatacaatttgtaccattcaccttttcatgcttggaaccaataaggtatatagtcattcactaacaataccaaaattccaggattttcttcaacgagaaagatatggttgtgcgcagctgcagaattttgctgcagggcttgaactgattgggcaaaaggttagaatcaacccccttgtggtttctttgatgttcaaaactcgttatttttccctctcattctgctgcttgaaacaatttgataactaaaacatagatccctatcgcatcgtaaaagtctgcatatttgagtaaacttatcttacatcgaagtctaactattgaaatccctcagctgcaaatgagtgagctacagaaccggttagatgcagagtttctattggctcagatgtgctccgtcaaattcaaagaatggatagttgttcttgccactcttttacaacggtctgaggtaaaaatcttttagatttccaccgtaatcacgactttaaagcattcacagtgatataaccagattgtttcattattttgtcacaacacaggttctttatgatattttccggtatgatctacggttgtggaaagcatatagcgtgacattagaggtaacaaactcttgtttccataacaatcgatatcgatttcatcacgtgcgggtctcctctttaaaacatgttctttgtttcagtctcacttggctttcgctcagtaccatgacttacttcagattttagaggcaaaactctcagcgacctcacgagaagaaagcaatagaggttccatctcttgataaatcattttatttttgaagctttttcacatcaaacattttctgcctgagttttcacgttcgtgtagataaacataatttgagaagaaataagaaatacatcacctcacatacttttactatttattttggtcacaatagaaaggaaaagaaatgtagaagtcatatcatgtttggcctaaataatcgaattgttacagcctgaaatcgaaaataaattgaaaaaaacactctgcattttgtgtaatgtgcgtgtatataaaaccattgttttgtccaacataaaaagataaatgtatatgtattttgatttactattcagtataacatgtttttattcaaatcaatgaagcttggaacaaaagtatatgagtgctgactaggtgtaatgttctggtcgttattattacaaatagtagattagaggtattaaaaaaacaatcggagaaagaaaaagagagttgtattaaaataaaactgaaaagtaagataagcgtaagcacccgtgaccgtgagtaagtatggaggcggcagaagtgggtcggcagaagtggggatgagtggagtgaaagtgggacaaccccaaagttcacaagaggctaattagaaaaccaaaaaaacaacaataacaaaattggagatgctcttttatgcaaaaaaaaaaaaaaaaaaaagcaacaataatgaaaattaacatggtttaacacattctcattcctatatatgttacatgcgtaactggagatgctcttgtatgccccccaaatttgcatagtccatgttacttcacttaaagatagttttatttctaactttttctttataaaaactaactgccgtaagtagtaactaccgagtagtataagatggtaatgtaaaatttagtagccacgtcgaaagtgacaaacaagtgatgtatctatactctactctcataagtcacaagtcacatagagacaatcacccattcttgtatcatatccttttcagatgcaaaaataacctcacacattaaaacccgtgagtaaacaaacgaagtaaaggaattgacgttgtactcacctcacattctctccctagtttaaacaaattatgattgttatatgtttggaaagatacatgcaacacattttaaataatatgttgtgattgagccgaatgcttatatgattttctattatacgtatagcaatgaacacgattatgaattcgatttagagtgatgatacaaccttaataccttaatccattcaggctagagaccataataagttaacttaatctcctcatcctagtcactactcgaatgccatctttacgtttaaaacaattatggccacactaacgatatacctatgtttgtttgctagtataataaggatatgtctctatttgctatcacttcagccttttctgaagacaatgttaccgctatatcttccaatcaattgataccactaaatgataaaatcattgctaatcttataagatcaccaaacactcagacaaaaagtttgaatcttgcttcttcgtttctccactctttatccgcttataaatactcttattctctcctcttaacatcctcatcaaaccatttagcctctccacactcacaaagggctcacaagtctcaagtaattctctttctctctctcaagcacaaacacacacaaatgtataaacaaacccaccatttttgctttcaaatgttagttgttcactatgtctcatttacattaaactctctttttctttttcccaaaagttgttcaccaaaaccaattgattagctctcattctcataaaaaaaacaaaactttacaacaattactaacctttcacatgcacccatttatttaccaaactacgaaaaaagatacaaccttttatatctctctctttaactaacttaaggaactaaccattctctcttcctttttttttttcagatacaaaacaatgaagaacatactagcttgcatagttaccatcataaccctctcaaacctcataaccatttctcaaggaagaagggtatcacagtcatttgaaacatttgagtacacagcaattatttgcagatcccacagtgcctccataacagagtacggtggtgtaggagacggcaagacgctaaacacaaaggccttccagagcgccgttgatcatctcagccaatactcatctgaaggcggagcacagctctttgtacccgccgggaaatggctcaccggaagtttcaacctcacaagccatttcactctgtttcttcacaaagacgcaattcttctcgctgctcaagacttaaacgaatacccaattctaaaggctttgccttcgtacggacgaggacgtgacgccgccggtggaagattcgctagtctcatcttcggcactaatctctccgacgtaattatcaccggtaaaagttttatcctttttttcttttttcaataattcgaaattagagagaaataaacctgaaccgttggatattattttacagggaacaacggcacaatcgacggtcaaggatcgttttggtggcaaaagttccacggtggcaagctaaaatacactcgcccgtacctgattgagttaatgttctcagatacaattcagatttcaaatctaacgttccttgattctccatcgtggaacatccacccagtgtatagtaggtatagttatatcctgtgtcacactctcatctaataccatgcacactcaccataaccaccgtacgatttaatttattaattaaaatatcccacgtggcagcaatatcatcgtaaaaggcgttacgatcatcgccccggtaaaatctccgaacaccgacggaatcaatccaggttcgtcgccggtgatcagatcggattaattactccaaattctcctactttatttctctaatttcgattttaatttgagttcagattcttgcacgaacacgaggatcgaagactgttacatcatatccggcgacgattgcatcgccgtgaaaagcggatgggacgaatacggaatctcattcggaatgccgacgaagcacctcgtgatccgtagattaacctgtatctcaccgtacagcgccgcgatcgctctcggaagcgaaatgtccggcggaatcgaagacgtgagagcggaagatatcaccgcataccaaacagaatccggcgtacggataaaaaccgccgtaggaagaggagctttcgtgaagaacatatacgtaaaaggaatgaatctacacacgatgaaatgggttttttggatgaccggaaattacaaagctcatgctgattctcattacgatcctcacgctctaccggagataaccgggattaattacagagatattgtagctgagaatgtttctatggctggaaggttagagggaatctctggagatccttttactgggatttgtatttcgaatgcaacgatttctatggcggctaagcataagaaagcgatttggatgtgtagtgatgttgaaggagttacgagtggtgttgatcctaagccttgtgatttgcttgatggacaagaatcagagacgacgaagaagaagatgattgacggtggatgtgattttcctactgatgtgttggagattgataatgttgagcttaagacttgtagttatcaaatgagttagcaaagttgtagtctttttctttgacctaatttcatatttacgaaaatttctctgcagggattatctgtgattttggttaaccaatctgtgagaagaagtataagttatcgatagaaagtgaacaaatccatgtgagattgggagatgaaacagagaagctgagacaatgattacttgttcataaagaaactgaatcagaccagactctttagaagttttctcttggattgttctatatgcctctctttctcatgtcatggaggaaaatggaaatgttgaaccttttcctgcaacagagttgatcaaatctcattttaatgggtctctaaagactgtgttgtgtccaaaggcagcaacagaaagaagaaacacgtacaatctatgatgcaaacacagatcaatgctaagccaacactctaagctctggtttttctgctaacgaaaacaatgaaatcaaccaaaataaaaaagagttaatgttgcacttacttcagctacgcacagaagttggaagaccgcctattggcaacaaaaccatttcaatgtcgtctaaccttcgactgcctctattatcgtgacgtgaccttccgctacaagcagaagttggatgcggtgtaacatcttgtgagcttctgctgcaagcagtagtataagtattgtcaacacgttgtggccttttgctttggattcaactcctccacttcgtgttcatcattaaccgagaggttgaagaaactcatacctcaaaataaagatgagattctcaccttaccttggatgattcttgctatggaattacgttatgatacacataatgatataaacattatcatcactgatctcaagcttcatgatatgactaattcggagcaggaatattggtttgagaattatatatatgaacataaatacaaaatgaagaaaactatattaccattcattgaaaatgagatcagaagatactagtgtaagtgttcattattaagttattaatgtaccactgtaccagtacgaagggttttattgttcagtacataaagagattacaacactgagagaaaatgggtaaaattgaaaatcttatatatccaaagtcatattgtacaatcgaaaagaagatcatatagggtcatgagttcaatttatttgtttcaaaatagttccaaatggatttaatgtatacatatagtattagaggcattgtctaaagataaagaaaaaatgagatttaatcatatatgtatggtccatgagttaactccctaatcattgaatcaaataaaccgtcacgaatgatttcacgtcctttaaaggttacatcagacaagttgccaattttcctgaagatttcatctaacccatgttccagtttctcgacttcttctttgcattcctcaatagattccttaaaggactcttgaacaagatcatcaccttcttgaattgtaagatacatcttcttcattttggcagcaacagattctaactcttggagtaccattgttccatcagtggaaatattaactcttgttttgacgtttacgatagtctgcaaatccaagaaatcttttttccacaatgattgcttccagacatatataggcaaaatatctttgtcggaattcgacaaaactatcacaaagacactgcagatataagccgtaagaacattagccccataaaacgccttcataagaacctttgcttcttttatacaattcttgactttatgaaagtttaatgattcaacatatctcccaagaacttcgcggcatttcgatatttccgcggtgatattttccctccaactatcaagtgcggaacaaatctcagtgcatagatcctcagatttcatttctaatttatgcctaaggaactttaagcaaacaatgccatggttcatgtgacgaagcaaggacataaaagcgttacacagatcgagcaattttgtatttatgttcatgtaattctcaaaccaatatccatgctccgaatcagtcatataatgaagcttgagatcagtgatgagaatgtttatatcattatgtgtatcataaagtaattccatagctagaatcatccaaggtaaggtgagaatctcatctgtattttgaggtatgagtttcttcaatctctcggttaatgatgactcaaagttgttcaataataaatttttctttggaaacaacatcctgaaaaatttctttggccggaagaaacattgcgctgtaatcccttgttttgagatcatcttgaaaagattctgagaaataaaaaaaagaagtcatcagaatttcgatttgtttgataaactgtcgtttatatgaacattgatgtccaagaaaattcgaaagcaaaatcacagttcaataatgaacgagaactataccttccgaagtcaagaaatcacaacaaaatgtatcgatgtaggtagacgagaaatgtaccacaagttttttttttttatataggtattactgtattattgagagaggacatcgtaataaatatataagtatcccgtgatgtgattgatataaattagggaagacataattttggcaaatcttcttctgcctacagtagttatttgatcaataatcacatctggatttattcattaatatatggatattttgggacaaaatcattaatctaaagttaataaatattatttatatgacatataaagataattaaaaatttggcctaaaaatataattcaaatttacatttttaaaattttctagcaataagagatactttctttttaaaacaaagataatatttttttatttgataaatggtacaaatttaagttaacacaacataagaaaaagaagcaaatcataatatttatatttatattctaatttggcctaataaaagagtatctttatatttatgtgattgacaaatgacaatctttatatctagtaaaacaaaaatcagaggaaaaaaaaaactaatcagatctttctgattaggttttgacatgtttttaaaatttatcatttgtaattaactaaaattaaaacaatttaaattttggcatttacacatgatcaatccaaagatatcagaagtccaaagtaatatttcaattttgtaaattttgattgaaaataagcaacaaaaaaaaacgagcaaaacatatgcaacatttaaacttcatccttgtttggaatttttttatatttgatagttagatagtttctctagtttcaatttgaacctgtttattgaatcatgtaatatatttgttatattgaaatatacacaatctatttaatttatacaaattattttgttatattgatatatacgcaatctatttgagtataatcataacaaattttaagctcgaagcaatggtgaatgaggagacatcaactttggtgacctaacatgttcctcgtacctcatcgaagataaactcagcttgagattcttttgaaaactcttacgtttcttgttctcccttttgttgttgcaaatgcagttacagttcttgttcttgttggctctgtctccaaccacaaagtctttgattcgttcaagtgcaatttggagtgtgtcttcgtccatattagcaaagcagactcggaaccaaccaggctcagagcagtgaaacgacgagccaggagagacattaatcttgaccttattgataataactcgccaaagcgccatttcggaatcaaatgtctgatccttaagcatatgcctcaaatccatcaaaacgaataaacccgcgttgcttctcaagcaagaaatccccatctcttcaagcccttccgtgaacatatggtgtctcttcgctactcttttcgaaacctcaacaagaaagttatcgacaaaactctgatcagacaacatagcagctagaaaactttgtgtctgcgacgagaccaatccaaaactcgacatcctccttgcgcaggacacaacaacatcgttgtaagagtaaaccactccaacccggaaaccgggaagacccatgtcctttgaaagactgtagacgatatgaatcagatcacggttaacataatacatctcttggatgatctctgcaacactgatgaatcccggttccgcaaaaaccgttgctgcgtatatttcgtcgcatactaagtgaatttgcttgtcgttgatgaagctgacaaggctttcaagagtttctcgatcgagagatgttccaagagggtttgagatgatcaggcctttgatcttgataccggtttcttgggccttaaggtacgctgattctagggcttgttttgtaatctggaaattgtttgagctgctacactccacagggattattctaactccagttctccaccttaagtctctatcgaatctggaatttttagtaaacccagtataattagtactgaagagagcaagtcaagcaagtgttaattaatggtttgacttttgtgaagagtcaatcgacaatttgatcatagttgtaacttgtgtggacggggttgcttaccaaattaaaatattgaatcaatcaaatgaggtatatttcacaaataattctgaaaagtgaaaacccattatcaaaagagacttttgttttttgacctatgtaattatgaaatcattagaacttttgcccttttcgattacttttattttaatatagtataatgtttacttattctatttcataacatcaaaatccctaattcatgtgtctttttaattattaatgaccaaaataatatttatttgaatactagtaaagtgtgtatatatacgtacgcagcataataaggagtagggacgagaaaagcgtcgccgggatcagcaagacagaacatgatcgtctcatttgctccggtggctcctccgctcatcaccaccctctccgcctcaaacctcacccgcccgcctctcgctctctccataaacgtcgcaatcgcctgtttattttccgtccccaaacaaaacattatttgaaagcaaattatagttctagaaatatacaaatctcaaattcctaagattataatatactcaattcataatcttacataaatgtaaggtgtataattactaccaaacaagagtacgtgaatgagcataaaaatacttgatactgtaacatatataagtatataataatttaatagatactgtataataataaaaaaaccttataagaaatgagataaatacctgtctaaattgtttgagaccgtgataatcttgaaaaacagcaatgtcggagaaagagtcaattccctccgccgtacaaatagatgcctgtggattttcctttatccattctttgatcaaatctgaacaaagctgaaagcaaatcacaataaaataaactaaattaaaaaacttattagaagaagaaaaagtataacgaactcattaggatgtaactaataagaagacgaacttgattttcggcgagacccatttgaataactccttgtggattatgagttggatgaaaaggattattgtcgtaagctttccagccatggaagtacggcgaagcttctccatgtttgtcactcaaagctaatttggatagaagttgattctcacatgcaccctgagacatttatccgttccagtaatttgaacaatgtgtgtgatttttgtgaatttgatggattagtttacttgtgagttgtgatatgtaaatgaatgggagcattcgaggattatttatagtgggatattgagagcgagcatatgaaagaaacttgtttccgttatgaggaaacttaactgaaattttctgttttctataaaactagtagtattaattttgcgtgaagtcaaacctacggccaaagcccaaaatgtttttagtctttttttttcttcatctatgccaattataacattttttttttacaacggaactgttatatggccaaaaaaaagtcttattaatatttatgagtatctataatcaacaaatgaacaaacatttaatttctgtaactgaaaattatagttttgatataaaaataaataagaattaatgatgataaacaactgtagatttttttagacacacctgtaccatgcagatggtacatttgaaaatttaagaactttatatactatgaaaaacattgtaagacaaagtatactttgtgttaaaaatacagccgcgacttggtatcacggtaataactaagtactaattacattaaaaagactttgtgtttcattaattttagttaaacaattagatcaagcaagaggttttacagacaaaaacaaattaaaagtcgagagtgttttaaagattcaacggagtaacaaattaacaagttcaagtcttacgaactctattattagacccacgttgatataagattcggggggagatgtttaccatgacttggtgttttacctttttcaaatcatatgttttaagttttaaaattacttgcgtgtcgaccgaaacgtaatcatggtctaatcacgtgaaaataaaatttcaaattttgtctttctccattttaaattagtttaagaggaagaaaatcatgtagagagaatggtaatgccgtaatgggttggtcgttgggtttagctccaaagagttcttcaaggtcattcattatgtttatagtaatccaacaaaattaacatgtgaaaaagtattgacacgtggagcagcccactgaattggcgatcaaagatctttttgggcggctttctagatttacgacatagtaaaactctctctacattaatctttgccttagattgaattggtcggagatcgaaaagactaaaactagatggacacgctgtatgtatctaagtggagtgattactcgttttcttagagtgtatttgtagggaaaaagaatacgtatacgcacgtacagttgttaggggtcggattgggcctacttggcccaatgcccaaacccaagtcaaaaacccaaaataagttccaaaccaaggagtattaaggcgaagggtagtttcgtcaaatccctcgatgaatgccctacacgcatagtgctataaataccgaatagcatgtcctgtcacgaggggggattccgccaggacacttagagacaaagaatagcccgtctcaagtagctcgtcagctcacccttctcaagtagctcgtccgtctaaagtagcttgtcagctcgcccttctcaagaagctcgttagctcgctcctcatcgccaagctcttcagctcgcctttaagctcttcaagctcctcggctcgtcctcaagctcgtcctcaagctcctcagctcgtcttcaagctcttcccatcactcagcgaccatctcctcgcctagctgtcagctagtcagctcgtccaactcgtctagctatcagctcatccctcgactgcaaaactcatctacctcctcgcctagcggcagttcgtccattgactgcatagtccacctatctcgtcccccagctcgtctacaccttcagcaaacaactcggtttgtccaactcgtctctcttccacggttcatccagctcgtcgcacatttgccggctcgtcaactacctgccgacctacctccaatgacggcctagctcacttattctaatatgaactacgtgtggcttgatccctttctaagggtacgtaggcaaccttttacaaggttcagctataaaacgaataaactctattcttcctcggacatcaagttcgtcttccggcctcaagctcacctttcatctacaatcagctcgttcttactccatctatgctcgttgaagaaatcatcctttgtaatccgtccaattcgcctaagtcgcaggctcgtctttaatagaaagattcttcttccttccctagaggtcccattttcgtacttgtgtgattcgtgcatcaacaacagtgactgtgatattaattacaccaacttccttttatcttgttttagtctttaaaaatattgatccttattccttcgtaaatgcatgtgatgcttttggcattaaatcgtgactaacaatatgaccaatgatcggaaccaatgatcggaaccaaagctagaggttcagcttccaaagttgtcagtttaagtaaatgcatgtgatgtttttctttgtcaaattggttgtaagttgtagattgtaacataaaatcaattcttatttgacgcatgatacaaaacctaaatggcgcttgaaaattctgacggttaactgtaacaaaagctcaagaggtgaaagagaatctgtattcttaatttccatatccatattgtataagattcgagaagaatattttagttctacgtagaaaatatacaaatgttcctcaaaacataataaaatgtgcgcacgtaataagtcggaacaatagggcgaaaaaggtgtacatttgataaatcgtgatttatacactaatgaaatttaagtgcgaagatctaacggtcctgacccctagggttaggggagttataatgattagtcaacaattaaaacaaaactaatcaactcgttgaacaaatggcagctttgacttccgcttctttagttgtctgaaaaaaagaaagccgagtcaaattctctgtttaggattcgctactagtcagctcgaagaaccattcaattcgagacacgtgtctgtccaagtctcggggacctcaaatacacgaggcccataagtaaatgggcttacttaagttactgcattgagaattgtagaaagctggattttttattttaacaaaatttagcaaataaccatacataaataaatagcgattgtgtaattatataaaatgcataatcaagaaattattaaaaacattatagtaatggttactgtatctaaacgaacattatcccaagctaaagacatcgaaaggtgaagctttctcggtcggcgaagcaacagagtagccttgcataaacttcctcagcttaactaactcatcagaacctgagagacgctccattagaatctccattgtgatctgatttggttcacaagactgttcgaccatctcatccatcagtttaagtaatgtctctccttgggttttctcgttaagacacttaaacaaggcattgtaagtttcaacattaggtctcaccatcttcatcttcatttcctctttcagagagagcgcttgcccgaaattccccagcttagaaaatgcgtttatgagaatgttgtatattacagtgttcggattgacctttgagtgcaaacccatgtccttaaagagcttcaatgcttcgtctaattcgccgactgagcaataagcgtcaatcaccgctccatatgtcgtgacagtcgggtctaacccgtcttctctcatctgctccatcattctctcaacactctcgaagtccttgtgtttaccgaaaaacgaaatcagagtgttgtaagtgatggaatcaggtttcttcccttctttttccatatcggttagcatctcatagactttctctgtattattcttatcacaaaacaacccaataagcatgttgtaagccaataagtcaagagaaaaccctccttctttcagtttctccaccactctaatggcgtcatgatcccgtctaacttggcacaatccagagatcaaagcataatagatctttgcatcaggagaacaaccagcttccaacattttttcataccaatacatagccttctctacattactgacgctgcaacaagcatgaatcaatgtcatataagtaaccacattccctttcacgccttccttttccatatccataaagaatacaaccgccatgttcaatccatggtgcctgcacatcccaccaacgattgtattaacagttaccacattaggtttaatctcgtcctctttcatccgagaaacgacttctttagccgtctcaagctttccagctctgcaatacccatcaatcaagcaattgtaagtaactgcattgggcgcacatctctcttccagtttcatccttaccaataactcctctgcttctttcaacctccccaccttgcagagcccgtcaatgagagtattaaaatgaatcgaatcagctttaatcacatttccatcatcagttctctttccacgcattttttcaaaaacttcgagagcttcatctacccttcttgatttgcataaagtgttaataagaatccctaaagtcacaacatcaggccggattttcacctcatccatcttcaagactaaatcattcattctactaatgtccatattccttcctaagcaagacaaaagcgcattgaagggaggagcttcaagtggggttttgttcttcatcaggtcgctcaaaatatcccaagcagcattggcgcgagcatttttgcatagacttgatataaaccgagtcaaccaaacagagtttggggagacaccatgagagctaaatcttgaaatcaaagcaattatcttttcttctgtcaaaagccttcccttccaaacctcgtgtaacacaatatccgctgtgattctattaggaggaaaaacagattctttctgaagcatttcgtcgagcaccttgaaggcatcatccacaagtccatttcttagcaagacgtctaccacaacattacgaacctgcgagtttttcatattcgaatcgagtctttcgtatacaagaaccgactgattcaccatacccatacgcccaaaccatcggatcagaagattagtggcaacgacagtaagaggaatgttcttctctttggcgatctcgtagagacggagaagtttatcacgcgggtccggttcactaccggcgaattcaatgaccgactgaagcgccaaggagagagattcttcacggcgtttcagagactgagacttcgcatccaggtactcgaagaacgagattgctagagaatacgatcctagccgccgcgtgatttgcgagaatactaaaggagaagcagaagaagaagatacgacaagcgcacttagcgactcgctcgacgcccaatcatgttgcggggttttttgaagagttttcacaaatttgactactacaaattcctggctctccaatttgatttccggccgtgggtcaacatcatatgaaaaacgacggaggaatcgagaatggttgagcagaatataagagttccggcgccgggaaattgatagcatgatactcatcgtctaaggttttgaaaaagacggccaccgggaaaagtgagacgacgaactctgttcggcgaattcaacgaacaagaagttgggcccattttaaataatgggcttacacatatttagcccaaataaacctttacaatattacacaatgggtacaaaaatttattttttctcataaaactgaacgtgagctttttattatgctgactgattacattatatttataacaaaatgaggacgaatctttatttttctcatataattatcctctttgttttattaatcaagccaccaccctgaactctgaaatagctcctatggattacactagttttacccgctaataactatcctattaaaggatttttatttcttcaacctactcaaaatgaagagctacgagaattgcaacagctttgtcactgagaagatggtgaatctgaatgatccatcttttcagctgatgctgctgcatcagaagcagctttatctaatcccaatttctgtaactcgcttaagaatccgtccaggtcgcttgaggagatcttgtaagggctgtgagaaggacctggaaacaagtgtttggatacttcttccttatactccaagagggctttgttgatcacttctcctacttgagcgtactgtttgcaaaactttggagtaacctgaaatgaaaaaatatagggatgcaacacagcggaaactatcagataatgaatcataaatacaggaagaagcatgatgatatatgaatggtccaggattttaccttagcgtgatgtggatgctgcatcattcccagaagatcatggtagactaaaacctgaatccacaagaaaaatgtgacatacttgatcagaaatgtagataactcactctttttgtgctgatcttactctttaatcatgcaaaaaggccaataactgagaatatggtttattcaatcaaaccatgtataagcacatgaaaccgaaagaagcctattgctctcgttaagacaatgtaaagagtatcaaaacgaacctgaccactgcagaaagggccagctcctatgccaatggttggaatattaagagcagaggttgcagcagcagccacaggaggtggaacacattctaaaacaaccgaaaaacatccagcttcttgcaaagccatagcagtttccacaacctaatccaccaaataagagaaaaataattttatcacacacccctttaaaaaataacctcttaaggattacatacacatgcctgaaccattacattcaaaccttaacagcactagcaatgtttttgccctgtggcctgaaaccaccaagaacactgatagcttgaggagtcaacccaacatgtcccataacggcaatccctgcttccacaatggattttgcagcagtgatccttgaaggtgatcctccttcaagtttaatagcatccattcctccttctttcaacaccctaactgcagtatcaaccgcctgaacatcattcaaactaaaacttaatcaaccaaatcgatgctttgctcgaacaataacaaacttgatatcaaagcgattaactgaaacataggataggatcctttgggttgtgaatttgaaacaaagtatccaactttcgagattattcacctgattggtgctagattcataagtaccaaacggcaaatcgccgacaagaagtggtcttttggctccgcgagcaacggcgcgacagtgaacaagcatctcctctaaggagataggaagagtggtgtcatagccatggacaaccatggcagctgaatctccgacgagacaaacatcgattccagctgtatcgatgtgaacggcagaagggtaatcgtaggcggtgaccatagttatcggctcacctttccgatgcttctgtctcaattgcgtcaaagtcactctctgattcgagttctgcggtttcggtcctccgtaaaccgtgtcctccggtacgttgctcataaaccggacggtggtgatggctctcgaagcacgagagcaacaactcctgacgagcgaagcagccattgttgttgctgatgaaagcgattttggaattagttataaatttaaagacttttggataaatatttttcttttaagaataaaaacgatgttggcgactcacgcgctggtgactccgattccaaagttgactgctttcgtactctctctatctactactccatcaagattgtctggttctgttccgggtttgattgatttctaccgtcgccggagattttgtcgtgtaatcacctccatggctgaagcgggatcggtttacgtcgatgtagctggggaatcgaagtcggagcatgttactgggaagtggttttcggtgccggagctccgactgcgtgaccaccggttcatagttcctcttgattattccaaaagttctcccaaaattaccgtctttgctcgagagatcgttgcgggtaacttgaaatttggagctttttgattcagagctctttctgtgattacgaagctaaaagtttgtgtcttttgttttttgtagttgggaaagaggagcaagcaatgccgtatttattgtatttgcaaggtggtccaggatttgaaggtccaaggcctagtgaagctagtggatggattcaaagagcttgtgaagagtttcgagtggtcttactcgatcaagtatgatgctttcatagttttatactcttctctggacagtttttttagtctttgtgttgttctaattttgtttgtcctgcagcgaggaacaggcttgtccactcctttaacatgttcctctatgcttcaattcaaatcagcaaaggaattagctgattatttggttcactttcgagctgataatatagttaaagatgctgagtttattagagttcgtcttgttcctaaggctgatccttggacaattttgggtcaggtaatttgtctttgtattgtctattggtcatcttgcttcagttcttgtcatttgattttgtattcatctttttttcttcaaatctacagagtttcggtggcttttgtgcacttacatatctgagttttgcacccgaaggactcaaacaagtgctaataactggaggaattccaccaattggtaaagcatgtacagcagatgatgtatatgaagccggttttgaacaagttgctcgccaaaatgaaaaatactacaagagattccctcaagacattgagattgttcgtgaactcgtaaattacttggctgaatctgaaggtggcggggtgagggattacaacatttgctcaatccactgaccagtttagtttagttccttacttgtctctgtttctttgtctttaggtacctctcccatcaggaggcattcttactcctaagggtcttcaaactcttggtctttctggtttaggatcaagtactggttttgagcgcctgcattatatgtaagagtttagcttaatttttatcaaccacctcacatgttctgtgttaaatctggccttcttaattgatcataggttggagagagtatgggatcctattttagttactggagctccaaagtgtattagtcagttcttcttaaacgctgtaagagacccacaaaaatttgttgttttctgttctcagctcaaataaggaattcaatagtctgagacattttatcgttgctgcagtttgagagttggcattcttttgatacaaatccactatatgctcttctccacgaggccatatactgtgaggtatagtctcttcaaatttctcatctttttttctatttcagacaattacttcttcttgttatcgtttatgtttaaatggaaactttttcagggtgcttcatcaggatggtctgctcatagattacgggataaatatgagtacaaattcgacgcaatgaaggcagtcaaagaaagtcagcctgtactcttcacaggagaggtacaggttttgagtatttctaattgtatggctcatagcttggatgattggtccacattgcttaactaaaatagaatttggatttgtatagatgatatttccatggatgtttgatgaaattcatgccttgaagccatttaaagctgccgccgatcttttggccaagaaagaggattggcctccattatatgatgttcctagattgcagaataacaaggtctgtttcagaatcttgatcgttctttcatatggatcaaataattttactctgtttcacatgatttctttttgtaggtgcctgttgctgcagcggtttactacgaagatatgtatgtaaacttcaagctggtgacggaaacagcttctcatatatcgggtatcagactttgggtaacgaatgagtttatgcattcgggtcttcgtgatgctggaagacaaattattgatcatttgttgggaatgatcaatgggaaaaagcctctcttttgattccttgtactagtcagtactttgtgacttgtggttttcttcgttatacactttctttgagaattaaatgagtaaaaaagaaagagaatgaataaaagaaagtctttcaagttttgactttcctttccatttagtgttcatgcagacagttgggcgagagacagtgagataatgtaaattctagatactacttatacaatatacgatgctggtttagcaaaatccgttgtagtctagctggtcaggatactcggctctcacccgagagacccgggttcgagtcccggcaacggagtctttttttgctttctgtttttttatttccggaaactgtaaaatagaatgaacttagaagtcgtgagatactgttactatctgctcattgctcaataaaatgttgaatgatgaaacgaaaatagctagaggtaaacaacaacaaaatatcacacatgtcaatgtcatacggctcaagcatttaaactaaataagactagaaaaacttgacctcccttgggccacactactaagtgaagtcactattcacaaaacgtataacaagaaaacctaataaatgcaaagctattaatattttgccaaacattgtattcaatgccgtagctacatttccccacccacctccccaaaacaccaaaaaaataaatacaccaataataatctctccatcactcttttttgccatcgacgccaatcccacatggccctaacctctttcttcaccatcaaatgtcaaccgccaccctcgtcgtcttccctcctccacctcctgtccctatccctacctatataactagcctcggccttggctactccatagccatagctctaggtttcctcgttcttatctccacaatcattctctcttcttacatctgttgccgcgcctcacgcctccgcttctctgcctccgccgcaaacgcaaacgcaaacgcatcgtttagcgaccgtggcgttatcgtcccaagaatcatattcgtagctgaagacgacgatcttgagtctggaaacgtcgtcgttggaggtcttgatcattcagtcatcaactcttaccctaaattccatttcactaaagatatcaccgccgtagtaaacggtgatgggtttcacgacggagaaggaagagagacgacgtgttcgatctgtttatgtgagtacatggaagaagagatgttaaggatgatgcctgagtgtaaacactacttccatgtttattgtcttgacgcttggcttaagctcaatggttcttgtcccgtttgtcggaattctccacttccgacgccgcaatctacgccgcagtcaactcctttgtcggaagttgtgccgttgtctcaatacgccgccgatcggaggagatccagaagataaaacatttcttttttttgctccgtggcatttattattaaatctttttttcttggtataatatataatttattgatttgctttacatactctttgtcatgtaattaagtttgtatcaaacaaacaaacaaaaagttcactgttgcattcatcttcttatattttagctaatcgagatttggactacaaagtcaagtcaaatatgtagttaatcaaattagattagattaattgtcggagatgaatgtctctaaagatgggaacaaattagttggaatttgagatttaaacaaaaatgttcctaaatatcggtaacgttgactaaaaaaacatatgtttttctaagcaattttaatgtgtttgaaatgtcaaagaatgtaaaaaagagaaagaaagaaagtctctaaccgagataaagactttgccactcactgacgaaatgtcccacgacgtcgttctatcgaccgtttgtttttttttaaacgagtgagccgttgatattattcttatatgaaccgatgactgccagtctgccacgtatacggaatctccttacgcttgtcggttactttatgtaagtaaaaaagaggagttacagagcgcaccaggcccactaggcctttgttggatccttggttgcctccacgttccaggcactaaacgttgacgtccgtttattccttctttaaaaaagactaacgtcgttaacgtatttctgtggttcgggtcacgaatctaaaggctcgttcataagttgcctaataaacctatttctccgttcgttctctccctctctctcgcttcacgttggatcgaaatcggacaaaagtaaacgacaatggcggaagaattggagaaatctatgcacaaggaagaatctctgatggagaagatcgctgataagatccacgatcacgactcttcgtcgtcgtctgattccgagcacgagaaaccagagtctccgtcagctttgaaggccaagatatatcgtttgtttggtagagagaagcctgttcataaggttctcggtggtggcttacgtacgttttcttctcatctcttttaatcgtttgtcgatgcttgatctgctatatgatatgaggattgattatgtttgttgataataagtgttttgctatgttttcaaaccatttggatttgtcttactgttgccttatgtttgcagcggctgatgtgttcttgtggagggacaaaaaactctcagcttctgttcttggtgtagcgactgcgatatgggttctgtttgaattggttgagtatcatttcttgagtcttgtgtgtcacattttgatattcgctctcgcagccctgtttttattgtccaatgctcatgcctttatgaacaagtaagcttttttgttgccatgtttcaagttacaatctacacgtttctctttctttgctttgcttaaaggttccaaaaaaacttttattttcaggactccacctaaaattcctgaaatccatattaaagaggaacatttccttatgattgtttctgcactgagaaacgagctgaaccaggcctttgttattttaaggagcattgccttaggaagggacttgaagaaatttctcatggtatgtttgtgttcgaattcgttattgtatacgtttgagttaagagaacaatatgatattgttgtagcataagttcagaacttattcaatctacttatgaaaccttctctatcatgggttttgtgacaaggactagtatatatattggtatctcaggtggtttttgggctgtggataatctcggttgtgggaaactggttcaacttcttgactcttgtatacatctgtaagtattcctaccgatagaaaaggttttagtttcgtctttttgtttgtttgagtctgaaattatctccatgtgtgtgggaaacaaaaaaaaacaggttttgtggtgttacatacagtaccaatgttgtatgagaaacatgaggacaaggtagatccagtggcagagaagacgttgaaggagctgaagaaacattacatggtgtttgatgagaaggttctttctaagcttcctgttgcttcccttaaggcaaagttgggttaaaaactttagagtgaagcaacctccctctctttattatctttccccttgacgttttgctttgtgtcttggggcatttttatttgttacttcagaaaaaaaatgttactctgtgttttcccttctctaattttgactaatacctttttcgtgggaaatgatttaaaatggtttctgtgaatgctgtgttaatcaaattttggtaaaagatgcaattagtcgttagctcatgtaatggtaaaacctttcacaaagaaaatcacagtaccagctgatgtaactttgtattttaatctttcaatcaaaatttccatcaaaaagtcagcagcatacatcaacaaaagaaaaattgacgaacaaacaaaggtgtgagatcataattacaacaaaagactcaatagaggttcaaattcctattttaaatgtaagtatgtataatgtttatctatgtaccatcttttaaggaagttatctcgagagtcgttgattactctcagatgatctgagaggcacagtagagaactctgaatcatgcaaagccgcctcttgtctcgtcctctccgaatcttgcttggctttactcgctgctgcttcttctgcttctcttctctctcgctcttccgcgtctttgagtaagaaatcgacccatagatccgcaaaagactgtaatacaaattccaaaaaaacacacaataatatctctcttagtgtgaaacttgcctgtgtagccgacaaaaaaaaacaaaacttgcctgtgtatcagtgtactttattatgttatggaggacttttacctggttatcagaagctgcattagcatgtaactctgcagatttcccacccaaaattcctccgacaaagcggcccggaaagcccaatacgcctctaacaactcctttacctcctccttgttttgccgctccaatccgctctttatcttcctctgaaaatcctagcatccgaaccatgaggtccaaaacctaggcgaaagcatgaaacaaccgaagtatatcagagacatttctcatatgtgtatgtcacaaactggatttcagaataatatcaatgtctattacctctttgttatgattcttctggaagtatgtaaccagcaatttaataacgattcgcctgcaaagacacatgttggttcatcattgcatcagaacacctaattcagacaggagaatcgaaactatatatgtccaagtgttaattggtgtacctatcaacaagataatcagactccattgacattctattgagccttgtcatgctctgctcaagaacacgtcgtacttttgcattgtcttcttcaaccttggttactctgtttttccattccgctgcaactttttccgcatgcaataatttggatgtgacatcttccttttctttatttgatgactctaaccgctcatcagaatccttcagcaaccgcaaaatagcatcagacagatatcgttatggcaggttgtagtttataaagggaaaagatagttatattcctactttcaaacgagcagaaagcttcatcaactcgtctttagccatcgcaagctctcgttcaaaatgctcctacaaaatgaatacgaacgcattgataaattgagagtaagaatagaaaaggaaagatttttgaatttcctaattccaaccttagcttcgatttcagcgtaatactggcctagagcagtttgaagatttaaaagttcaacattcttggactcgattgttctcaaacaatttgtaagtttttgatttaggtcatcaactgtgtcctttaattttcggatttggttgtcattgctcaatctgttatcctcctgattcgagatggcctgcttaagacttttctccaagtgtgatatctgagacctttgatattcattagtctggcggagttcttcaatcagtcggctatcttcatccattttctcagactcctctgtttcctgtgaaattatggcaaagaacacacttttcaatcatcttcacagaaaattatcaagaaaatattgtctcggctgaattcataacaatcttagaagctagaaaacgaaataatttgcaaaataatgatccaaaagctataatactacaacaaatgtaaccatgtcccacactaatagattcagtaaaatattagcttttacgacagctgctaaccttttctagcaagtgctgtttgagtcgttttaattcttgccgtgccttatctctttctctttgtgtttccttcaaatccatttccaacctctgcagggattgctccatttcttcttttccaggaaagctttcaggcttctcctagtaaaatatggaaacggcataagaaggaaggaaaaaggtagctccacatttaatgaaaagcaatgcaaaatgcgtttataattaagttccttctagtttaagaaccttgtccaaagtactaggatgcctagtcagagactctgtggcgtccgggaagactttgctattggttagcttcctgctttcttctaaagcagcttctagctcacttcgtttcaactatgaagtgatgaaaaagcatatcagattcggttccagattccaaaagtcaacgtagacatacacaatgttggcaatttttgcttgcacaaccattcagcagtatggaacacaataaaccttaagctcgttgttttccttctccagagctttgttaacttctttcagatgttccatgccaggtccaatagcatggctttcctgaccagtcaacttcatctgcaggtgtttgatttcaagtaattttgcatccaattcactacgcattttgctaatctccatggaggtctgcaaacagattcaatacagaaaataagaaaattgtaacttagagatggtgattcctaagaaaataataaatgtgtcttttctaactccaagacttactttgtttttatctaacctcatagactcgagttcttccttgaaagattcactccttttccgctcctctgatggaagtaaggtaagtgagaatactagctaacatggatacaaaagaagcaccaagctacaagtgatattatataccctgtagagatagctgaaaatctcttaatttttcacgctctttggcaagctccgtagcttgaacagctgccattgatttggttctatcttctagcatatctgcaaggtcctaaaaggacatccagtttatcgcttataatttggtatttaccaaacaagaatattgcagagcaattacttatgtattagaagatgtatctaaagaaattcagaatctcagaagtatgtatcctactgacaaccaattttcaagaccccaaagcttttatgttaagctaatggtaaataaacattagcgttaccttttcctttataaacgaatcggtatccttcccttttccattggacatatggtttggactttttaaatgcgaaacagatttgtgtagcctattgggtgactgatcattgtttccctggagaagataaataacaaattaattgaatagtttaagaccttcacttaagaacgcatctctcagcaaaataaacacataaacaaatgtgacatacttatcaaaatagtgatgttgacaaaactttcttgatctaatatatgatctcataatacgctttctatcctagtaaatcccactaataaacttagcatataaccaatcctatcaataatgcgttccatgccaaaacatgcttcacacattacaactcttaagtagttgcatgatcctcgtgatccttcacacacagtatgcgcaaagaatcgcatagagatgaaacaaagatatgaagtgtctaccttgatagcatagttgtttgatcccctggaaatgtcggttctagcctctttaagagcggcactagttgaggtcagattttgtttcaaagagccattctcctgattcaatctggaaatctgatcctgtaataatcccatagggtctttgatgtaagaaaaagagagaaaaacagttaatggcttgaagattgtgtgtcagaaactaacctctttctctcttaagagagctgcataatttacagataaggctttgatatctgattctgattcctgaagcttcttaatctctgccttataccgctcaatctaaaatgtgacacaaaattgaatcataaaaacaaacttaacactagaccaactacatcacagattttgagtaacatttccagtgaaattcagatgcttaatctttaaatctagcaataaatttatccaattcagaccaaatacctcatgatgagcaggcgattcaattccattggagatcgaatacctcgaaacggacctaaaaccactggaattcctccgatcagagttcgatacgccattggcggaaccatatttgtggagatcgtcttcttcttcgtcgtcttcatgcacatcgagaacgatcttgtgcaagttcgccttcatattctcaattgaactccacatagctctatctcaacacctactgcagcctcaaaggctcaaaaaccccacaaaaacacagatcacttgtctatcaaagagacaatgaatcttcgtcggaattgagcgcagataaacaataagcagaaatgaatttcgtgttcttttcccggtcagagagaagagatttggaattgaaataaatgtttagatcatattgaattagcgtattcattaattaattaactcttatcgttacgttttaaaacaaatcgctactcgtagcaagttattattattaatgggcttttaaaaacaaaggcccaatagataaatatgagacgtcaaaataaatctttagacaaaaaaacacaaacacaacagccgtcgttgcaaaatctgtcaggacatgtgctcttcgatggtcggaggcattgtgaagaagttgttgatttcacttggaaagtctagctctgccttggtcagcggcaaacttttgaagaagttgtagattcgacttggtatgtcactgcgaagaaactgggaaataggccaactgggcattcaaaacttaaaaccaaatctgtaatggaaccaagcaaacgacaagacaaacgaccaccgcacaaaacgaagccagtggatcgtcacgcgatgtcaatatcgacttgaacctttccacttgtgagtcagcataatccatcatgtacaacaatttctccgacatcttcatcaacctttcgtgcctcaacctcaaaatctcattatctgcgctagtcatatttttttatacgagaaattacagagaaaaatatagaatgacgacttatcaaatttgaatgtgctctttaaagttttttattcaggcactacccgttcaatgttcatataggacgtaagagaaaaaaacggaaaaaaaaaagaaagtaaaatttaacattaacataattttagaaaagggaaaattcacatatacggtataaatttgtaatagaccgtcctatttaaggccgtacatgttcttaattttttctaaatcaacggttctgaactattaggaatttaggaaatcatttccatatatccaattatctatatatgtaatgtatatactatgtaggtttcatcgcggcccttttggatttgagtttccagaataaggcccattttcaaattaagatttcagatcaagaccccttttccaacccgttgtgtaggcccaaataaatttcatttgactgaacatcaaaacttcaaaatatcttcttctacaaaattggcattcgtaattatcttcttgaaaacaaaacaaaatatatgcaccaattttcatttgtcacacgttgtaggcttcgaatcgtatgcattttataattttacttataaacaaaagtgacatcagaaatagtatctcctatattataaaaatgaataaccaaccatcttcccactgctttcccaagtcttctttgtattccttacaccaaacaaaaaaaaaaagtcttcttatttcccagttgagcaatttccctcccttttgctatttaatttgttcttttagtaatattatcaatgtgtttatctgacttttattctcctccatggataaaataaagatatcccacttgaggaagaaaatatcttggaagagttaaccataaatcagaaaaagatatggaagagaacagctgtgtatctttgagaccaagtcttgagaagcagttagacaacatggacggtgctggttgcattcaaaaatctttctatacataaaacggaatatgccaaaagtcatcaatatatcgtaaaaaccatatgcttctatttataaattttacatttcataaactttaggttagtttatgtttccatatcactcatgactcaacacatatgctaatattcgggtaatttatagtaaaaatgaaatttttaaaggtaaaacctgtatttttgtttttttctgtaaaagaataaggctttattgaccacaattagaggatacttttctttttcggttttggcatttggtgatactcttatttattttcttaatgttgacattactaacttttttggagcgtagaaaaaaaattgacggacaccaaccaatgacagaacatacagaaaatatctaaggtaacacgtggtctgtcttgcatttcatgattacttacgagggacagcactaagtttcctcctttctaattaccataactaaccattttcttaattgcccaataatggtccctctttaccaattctgatataccacccaaaattaacatcaaacccaatatttaaagtcccacacgtgagaacgactgacgtcggcacgctttagccacgtaatttcggtctccaaaaattcaatattaatccgcgaaaattcactaaatataaaacaaacccataatataaggaggataaggaaggagtcgaagataagcggagagagagagagagacagagagagattcaaaaatccgattccagatccattcctgggcaaacaaaggttggtgtttctctaatctcaaagcttttttcaaattcggaaaaagcaaatcgtgggaagagattcatcttctctctgtgcgttcatcggatctcggagcttttggttcgtcgtcaatggcggaagagacggagaaaaagtacattacgaacgaagatcttaaaaaacacaacaaatctggagatctatggatcgcgattcaaggcaaggtctacaacgtctccgattggattaaaactcatcccggaggcgacacggtgattctcaatctcgttggtcaagacgtcaccgatgctttcatcgcatttcatcccggaaccgcttggcaccatctcgaccatctcttcaccggttaccacatcagagatttccaagtctccgaagtctcacgcgattaccgtcgtatggctgccgagtttcgtaaactcggtctcttcgaaaacaaaggtcacgttactctctacactctagccttcgtcgccgccatgttcctcggagttctctacggtgttttggcttgtacctccgtcttcgctcaccaaatcgccgccgcgcttctcggtctcctctggatccagagcgcttacataggtcacgattctggtcattacgttatcatgtcgaacaaatcttataacagattcgctcagcttctctccggtaactgtctcaccggaatctcaatcgcgtggtggaaatggactcacaatgctcatcatctagcttgtaacagcctcgattacgatccagatctacaacacatccctgtcttcgccgtctccaccaaattcttctcctcattgacctcgagattctacgatcggaaactcacgtttgatccagtcgcgagattcttagtcagctatcaacactttacttattatccagttatgtgctttggaagaatcaatctcttcattcaaacgtttctcttgctcttctccaaacgtgaagtaccagatcgtgctttaaacttcgccggaatcttagtcttctggacttggttcccactcttagtctcatgtctaccaaactggcctgagagattcttcttcgtcttcacaagcttcaccgtcacggcgcttcaacacattcaattcacgcttaaccatttcgctgctgatgtctacgttggtccacccaccggtagcgactggttcgagaagcaagcggcgggaacaatcgatatctcttgtagatcatacatggattggttctttggtggattacagtttcagcttgagcatcatttgttccctcgcttacctcgttgccatctccggaaagtttctccggtggttcaagagctttgcaagaagcataatcttccgtataggagtatgtcgtggtttgaagcaaatgtgttgaccattaacactttgaagacagcagcttatcaagctagagacgtggctaatccggtggttaagaacttggtttgggaagctttgaatactcatggctaaatgattttaatcaaaacaaaatatgcttttgtttgggttaaatttgatgtgttgtttttatgctttattgaatctttgaatttcgttttgttacttacttacatggaagagatgttttagatcgaaattgaatcgagatttgatttttttattagacaactcttcgtatcgtaatgatttattaataatattattttgaatttaatttgtttttttatataagtttttgtttcacatggctcttttttgttgcctgtgacttactttgtggttttgcggcttttggccttttcaatgttttgtcgtgttacattaaaatacgtgtgtggatgctatttgagatcctctatatgtaaggttttaacagatcaacggtcgttgtgttattttgggtgtgtgattcgtaaccacgaaacgttgcaacttgcaaagatatgggcttcttttttgacctcatacttcttagtgggctaagatgggtatcaagcttgtatattggtctttttgatattcaattaatgggctaagttatgcaccacttgttcagacccaagcccgtgactacaaacacttatggccccaactccaaaaagaagaaagaaacacacaaaatttcggaatgttatatgtttcaaacacaataagtcagggaatggtttcacttgaaatgtttaagccgataaaagaagaggtgaaggatttagttttctgaactagttcatgatttcaaagatgaatggtcatgacttatgagactcacgtagcttactgttatctggtaatctcgataagttattttattatgagtcaaatcttgaatttggaggatcctcgattgcgaatgaggaaggataagtctttgggaacattttgtactttttagattatgtaatccggtttcctttatccggtttactgtaattatgtagttggtttactttggtttacttgtatgtatataaactcaattgtatcatacttagcttaatgagaaggttaatacattcacattatttctctaatagtactgagattagagaattcatctttatgataaaatggatatataattatataaatctttctttaaaataggagatagagagagagagtgagaaaacagtactaaaaataacaacttgagagagaaacagtaagaaaagagagcaacaaaatgtggaacagaagaagtatgaggtcattagttgacttttaagtttactccactttcctacaacaacaacaaaaaacagcaaaattagtccacttccacaatcatttctctttttgatttacttctaacgatttttgttaaaacccacgattatgttacaatacctaattcatatgttggtaatttggtgtacatctgattagtttattaaaacgtgtttgaattaagtctttagtaatcgtggtgtgtggtgaaaatgaagagactgtctatatcgacatatgtgttgaatgggtaagtgccatggtcaaagcttataactagttttcattgtcttttgatacgtttctccaaaatcttttctatttttcagctgtattctgatatgaagtctggatgaaggattttaaaatggtttagaattcagaaaagaaatttactagttattttttaaaaatgaatgtgtgcatgtgtgagtgtgtttgctccatagtgtaaagaatgagaagtgagaagtgacttaatgtgcacaaaggtgcctttggcagaaagatcaaggcctggtccataacacccccaagtgacaaattagtatttgccactatgttctatatacatttttatcctttctttgtttattgtttttctgtgtctttacacggaccaccaaatgggccaaattgattagtgcatattgatcttgctagatcttcccacaatcttcacatcgtaatcatgttcttttaagaagaaaaagtgttgttttcacactcttaactcatatatagatacacgaaacacgatttgactacagcttctactctctaggttagttaaagtttttttattattttaaaagttattagttagatgcttttcataaacgatgcaagaaggtacccaaaaagaagttgcaaaaacaaatcttattagagtttgttttcattattatcgttgcgttttatttgtttacgagtgaagaaaagagaaacaaaaatatagttgctgaaattttagtatttataaaattcgcagcaatggatattagaacgtatccataatctgactatagataattctatatcgtgccaagaggaaccaaaataaattgtacatgtcgtttgattcattcctttaatttattgtgtaaagaaggatccaatcctaacaaagtcttcaaaaccttcacattttttcgaaatttaacgacaactatagggtttctagctagatttgaaagttttttcacagttacacctttacctatctgcagtaatacttccacaaaactaacgttaaacttctgccggtacaaatacatgtgcttatgtaagaatgaaaacattttgaatttaatattttgcactggacacgtttttcttttgccattatggattttcacatagtgacggatacgtgtagatccgccgatccctatgacaacatagcattttggaatttgtttacgttcaactcctttaaataaatagttaaggcagtgcgtcactatactgcttattactacatagtctaatttggtatatgctttgattatggatttatgataatcaaaagttatatggtataaccaattgtcgttagctcaattggtaaagaccttaggcgaagcttagaggtcgccggttcgtgtgatgtttgggacgaaactaatattacatgctgtggtttcgggcctgaggggattacgggcttcggcccaaaacttcttggatttcaaaaaataaaaataaaaaagttatatggtatattcttttggatatttcattctctttttaatttcgtttcgccttaaccgcattctctaattaaaaatttaggtacatgattcacacttttacagtttagcaatgtatacagtttcgaaacaaattcagtttccaatgcccatgaaaacgcgtataataccataaaagtttatgttctcaaactagattgagattagtggccaattgatcatgcatgttccatttaactgaagatatacgtaaacatgatcaatcgtccatgagaacaatttcagtcttgctacactaaaatgcaacggatcgtaaaagtgatttatattttcatagaaccaccacataaataattaacaattgaattcagatcttaaaaaacatagacaacagaaccaattttgttctaaaaaaaggcactaaggagcaatgtgatcatatagtttaatgagccagcaactaatcgcacacttgtaatataatggaatatataaatatgggagtagctagctatataaaccataaagggtaagggcatatgatcgaaagaagaaagaaagtaatgcatatggagctgagatcagtatatagctttacacgttaaatgtagttagtgcacatgacgaaaaactaaaaataatacacttgagataatttgcgttgatttttaattttgaatttgtagagtgagtgtattaggtaaaggacaggccactgagaaactgcgagaagtctaggctaaggaaagtagagagacagacctttcagtgtttcaaaagcaaagtataattactaaaggtaaattataatttttaaaaatgatcatttatttattcaaatatcaaataattagaagacaatctttctaaaataaatataaacaaaaaatgacaaaaaggttacctcatgtggtatgtcattttcagctaacccctctggttgccagagtaaataccaaattaagtaactttttaatttactaatgtataattgttatctttcgccctcctaaatttataacaatatataatatactgctaaaaaatatataaaacttcttatattagtaatccgatatgttggttaaataaaataaaactgaaataatcatatttagtctaggtacaatattaataacgccgggtttaaaaaatcatttaattggttggtttatgagtaagacagcattattattggtgttatgatatttcattgttttttgtgtttgcaagttctaatttttgttttttctttcttttgcaaataattaaattattgtatatttaatactcacatagtaaaaattaaggaaataacacgcgctaacacgcgcctcaactttaatcattttatttattcaaaccccatttcggaaataaaaatgacaaaaaaaagaagaagaggaagaaaaacagcaaaaacgtctactcttctctcatcctcgcgcttgctctctcttctcttttttgtctttccctttcgtctctctatctgtctgtatcattcattcgtgtttatttacaatcgaaccacgaaacgtctcttcttctctataaaaaccagatttttctcaatctcaatctctctcgctctcgctctcgttttctttgatgaacccttttacttcattcttactcttgataaatccaaattcccgagaaacccatttcatttccttcttctgtttctagaaagacctcttcttttcgataaaccgagatccacgaaacccgcatttcctctcgctaatctattctaaatttcgatactttttttttttttttatcggtttgaatctcgagaattccgaagattcagagtctccatagtcgaaggtgtgtagcgaatcgagatgggtttctgtttgatttcactgtcgctttctctgctttcatttctgagtggttcattgatctcttccgtgttcgtaatctatgattgatgatgtatgttgttatcagatgtttgattgatgtctgcctatagtctaatttcattattaagaacgttttttttttgtatacctaacatctaaattttgttgtattaattgtcatcagtggaatcttgacgttgaaaggatgacacaagctttctcctttttgtttttcttttgtctgaaaaatgtattgcaatgttagacaaagtcttaatactatctctcttcttcgtcttctgcattttcgatttaccattatgcatgtatgctaaagcaaatctgattgacaaggttttctcttgatttatgtattgttgttttgtgttgttgaaatgaatgatatttgggattcagattcgtaaagctttaaatctttatgtgttcttttcttggtaatggatttatttattttttgtatcgttgtttcagaggctcttgagaatggaagcagaaacgtcttggaccaattatccgtacagctacattacatatgtccctgaagctgaatcataccgtgagcagagcgacgatgaagccaaagtcgaaaccttttcaatggattctcttctccctgacgatttattagaacgaatcctctcgtttctacccattgcaagcatcttcagagctggtactgtctgcaaaagatggaacgagattgtatcttctcggaggttcttatgtaatttctccaacaattcggtttcccaaaggccttggtacttcatgttcactaccacggatgatccatctggttatgcttatgaccccattatccgcaaatggtacagtttcgatctcccttgtatcgaaacatccaattggtttgttgcttcctcttgtggattggtttgcttcatggacaatgattgcagaaacaagatttatgtctcaaatccaattaccaaacaatggaggacgcttattgaacctcctggtcacaaatcgacagattacacggcaatgtctacctccgtaaaccgagcgaaccaagcagtaaaccgcgcaaaccggagttactcagtctcgatagtgaaatcgaagcaagttccagggaatttcttccaatgggatctctctattcatctctacagctctgaaacaatgacttggacaacattagtaaacgatgtcttatccggatggagaggagggaacgagagtgtgatctgcaacaatgttctttacttcatgatatactcaacgggaggctcagatcatcgccacggcttgatcgcttcgaatctatcctcgataggatcaccgtcaagcggaatcttgatgaggagtttcattccaatgccgtgttctttaacctgcgggagattgatgaatctaagagagaggcttgtgattgtcggaggaatcgggaaacatgatcgaccagaggttataaaagggatagggatttgggttttgaaagggaaggaatgggtagagatggcgaaaatgcctcaaagattcttccaaggttttggtgaattcgacgaggttttcgcgagtagtggcacggatgatttggtttacattcaaagctatggatctcccgcgcttctcacgttcgacatgaatctcaagtattggagatggtctcagaaatgtcctgttactaaaaagttccctcttcagctctttactgggttttgcttcgaaccaagactcgagattgctccttagttgcaatgaagaagcaaatgggtctgtgaaagtcttggtcttttggattgtttttgcacagagaaatcgccggcggctttatgaagatgatgatacggtaatgtttttaaattttagttactggaaatgtttttcaggaatattgttatttgcaatttggtactctgttaattataaatttataaaatgaggcccagatacttttatttgaacaaacgaacccttctctatctctcagtgaaatataagaacatttttcaacatgtggcccacaatatctcatgtaaatgggtcggattctgaaactggaggttgtcttgttgctgttcctggtggataaaaataatgattttgttccttttttttccacatatattcataatgatttttcatgttttattaattaattattgttgtaaattattttaaagaattatgtttctgtacttgtataaaattgggacctattttcgtgatgggatttgtcaggtttggcagtgttaggtttacgggtaatggacaacagctattttattgtgtattttatcattttctcaagggtcacttattttcaattttcatagctataataatttactaaattttaaaatataacaaaatgtcattcattagttataatcgtataaaagttgacgaagtgatatatagattctacatactaaaaacaaaattaatttgtgtcattatgccaaaatgtcaaaaggaaaagaaaatttagacaattactctgacacatcaaatcagctaaaacctaactaaatataccaaactagcaacacatatttttgttattaaaagcatttataatgataaatcatgatcagaatcatagtaagcagattcgaacactagtctctcaaatttcggtagtaaagttttcaaccattagaagacaaatacgattttaacatcattagtattgttttttcttttttaatttaagcgttggctttccaaaatgaaatagtaacaagcattaacgagttaagttgtcaatgggggaagttaaaactctttaaaaccaaaaaattgaccacacaacacatatagtgcccactagttctctcaaacgaatatggaatactttaaaacccacctctattctcaagaattaaagcccagaatttcaacgttctaaaaatagttttgaaagatttgtttttcacgggtttttcgtaaaataattatgaacaaaacaaataaattcaaactaatttttacacgtacaaatctgactcctagcctcctagatgaaattcaaaattttgtaccagcagctcaaagctactaggtaaaaaatgtcacgagagaaaaccggaggaatattggtggttcatcaatacgaatcaaaccgaaccaagtcataaaccggttcatagaaagataagaagacagacaatcagtcatcactttggtctcgttgagcctttcgtctatctctcacctgaaagaaagacgttcagctttctctttccaaaatcaaaagctctccgatcagtttctccggcttaggaaattaattgaaggaaggtgatgagaggtactactgagaatacggatctgttcgatcccaaaacccaaatggatcctgacttcactcgtcatggttcttcctccgacggcgattttggattcgcttttaacgacagtaacttctctgatcgtttgcttcggatcgagatcatgggtggaccttcggattctcggtctgaagttgaagggtgtacgagtatcgctgattgggctcgtcatcgcaagagaagaagagaagatatcaagaaggaatctggtggtatgtaatttgttcgtatggtttagggtttttgttattgaagtcgaagtccaagtctttttgggttttaatgttgtgatttcattttgcagtcacgatttcagacattgtggcatgtcctgaggagcagattttaactgatgaacaacctgacatggatggatgtcctggtggtgagaatcctgatgatgaaggaggagaggcaatggttgaagaagctttatcaggtactactatagagcaacatcctttggcgaagttttagctgtacacaaaggagcttgttttgttctgagaagtgttttatttatttaatgtttaggtgatgaagaggaaacgtctagtgagccaaactggggaatggattgttctacagttgttagggttaaagaacttcatattagttctcctattttagctgccaaaagccctttcttttacaaggtatctaaataggttgttgatggattttgcttttgctctcatgtgtaccttactctttaatccatttgtgttctttttttctcggaaatgttgatagttgttctccaatggaatgagggaatctgagcaaaggcatgtcacccttaggattaatgcatcaggtacgccattgcaacattagctatctgaacgtgttattgatttatcacactagatacagttgtaccgttctctattaggtccacagaatcaaaatatggttttgatttgagtttgttaaggtaacttggagattcttagattgatttacatattatactctactttgtgtgtattacagaggaagctgctttgatggagcttttaaactttatgtatagcaatgcggtatctgtcaccacagcacctgccttattagatgtgttgatggctgctgataagtttgaagttgcctcttgtatgaggtactgcagtagacttctccgtaatatgcctatgactccagagtctgccctgctctatctcgagcttccctctagtgttctaatggccaaagctgttcagcctttaactgatgctgcaaaacagttccttgcagcccgctacaaggatattaccaagtaaagcccctgaaactacatatccatgatattactgtaatcaagagcacatgagatggtggggcgattcttataaggcatgtctaaactttcttttccaggtttcatgaggaggtaatgtctctacctttggctggaattgaggcaattctatcaagcgatgaactccaaattgcatcagaggatgcagtttatgattttatcttgaagtgggcaagggcgcaatacccttgtttggaagagcgaagagagattctcgggtcacgccttgcactctccatccgcttcccattcatgacatgccgaaagctgaagaaagtgctgacttgcagtgactttgagcatgaaatagcatcaaagcttgttctagaagctcttttcttcaaagcagaagccccacacagacaacgtagcctagcctccgaagaatctgcatccctgaaccgccgcctgatagagagggcttacaaatacagacccgtcaaagtggtcgagtttgagcttcctagaccgcagtgtgtagtctacctagacttgaaaagagaagaatgtgggggactgttcccgtcgggtagagtgtattcgcaggcctttcacttgggaggtcaagggtttttcctgtcagctcactgcaacatggaccaacagagctcgttccactgtttcgggctgttcctagggatgcaggagaaagggtcggtgagtttcggagtggactatgaattctcggcaaggtcaaagcccgcagaggatttcataagcaaatacaaagggaactacacattcacaggagggaaagcagtaggttacagaaacctgtttggggtcccatggacgtcttttatagcggaagatagtcaatacttcatcaatggcattctccatctcagagcagagcttaccatcaaaaggtctacagatccttagtgaccgtttacttctcaattgtcactgtctctctttcctttacctgctgctaaatctctcgctctctctaacttgccttttttttcttttcttttataaggcttgaagaagactaataaagcttataaaagtaaggttaaaaacgtttcgacgacaacgttataagaagaatgtaaatgcgttctttttttctatctacccttactcttttggctttggattataagtttaactcttcaatgaaattcttagcgtagagattcttgtattatgaacgaagttgtgaacagaaaagaacgaacgtaactctctcgtctcatttaactaatttatctagttggattgaaatagacatgacttttcgatttgggccatgcgtatgttgttggagttggactattttaaattcctgcaatcaatttcaaaaaaattcaaatcatattgaccgttgattatataccgtacacgtggtacaatgtcacagatatcttattataatactatacagttcacagtcctttgttttctttattagacaatcatgagacaaagtactgtaataaacaattaatcatacatggaattgtgaagtaacttttttgttactcttttaccagaaatgatcaaattttacaaatgattattttttgttctaaaatttattttaatgtcttagattaaggaaagtaaactagttttgtaataaataaagaaaaataattaagctcttaaatatgtataaatgattatgcatttaagtattaagaaagtgcaatagttttttttattttattttataatcagagaatcctcgtgcaccaagaatctagttccactaattaaggtgttattcttctcctctaacaccaaattatgtttgtatctcttatttaaattcattaatgacaggtttgacattaataaataatattttaaaatataaaatacattagtaattaaaattaaaaaataaatgagaataaagagtttcatctgtatcccgacggaagttgagttctgtttccgcccatttctatctgaaagcaatgcacgtagcctctctcgtccatctccttaaattcaacaagtatttaatctcttcctttaaatataaactctcaagttcatcaaactgtttccataagaactagtttttcttttcttcagatccaattttataaagcaaacctgagatttttattaatataatatatatattgaaaaacttccaaaaatgagagttatctgggtttaatttaatttactaaacatcaagatagctgttttgctctttctatcgccatgtgttcttcttcttctccttccttgtctcttttttttaatgtttttttgtttccttgagtgaagagtgtagaagctatagatttccagatctagtaacatcgtcttcatgagatttttgtgacaaagaaaagctcttttgtcgttttttcttctcttttggctgtggaaaaaaatcagaaaacttgtcagtgtgtaagttgttgaggttttcaaaattgaaaatgggtcaatatgcaacagtgtgggatcaaaaagaagcaagtgagataatcaaagattggaatggcgttgaccaagtccttctcagaaacccacatggtgcttctgccaaggtcttcactttttctccaaccattcttgtctgataaaaattcgagcttcttttgcttattctgtgtttgattttccagataagtttacatggaggacaagtgatttcatggaggaatgaactaggcgaagagcttcttttcactagcaataaggtatctgatctcactacaaaaccctgatacattgtgaagaatctgaaacataaaaagtaaaaatctgatttttatattgttatgaatttgttaggctatattcaaacccccaaaatcaatgcgtggagggattcagatttgttatccgcaggtaaaatttactagtagcgctcactgaactgagatcttttgttgatcactttttcattgaagttttgtgtgtgtgtttgtgaagtttggggattgtggatcactggatcaacatgggtttgcaaggaacaaaatttgggtaatcgatgagaacccacctccacttaactcaaacgaatccttaggaaaatcctttgttgatcttcttttgaaaccatcagaagatgacttaaagcaatggcctcataggtaatctcctcatcacttgtttcttcattttttcctcttgacagagattctaaaattctatgcttattcccttgcagtttcgagttccgtcttagggtttcgcttgctgtagatggcgacttaacattgacttctcggattagaaacatcaatggcaagccttttagcttctcatttgcatatcacacctacctctctgtctctgacataaggtattactcttcaataagtcaagcaaaagattattcagtgtttggtgaaatctttataacccaacaatgtttacttttcttctctacagtgaagtgagaattgaagggttggagacattggactacttagacaacctcagccaaagacagcttttgactgaacaaggcgatgcaataacctttgaatccgaggtaaaccttaacaagattctgcagttatcgatagtgaacaagtatctttgctcggttacttcatatcagaagtttcttttgattcatgtttcagatggaccggacataccttagatcaccaaaggtggttgcagttcttgatcatgaacggaaaagaacatatgttatcggaaaggaaggacttccagacaccggtaataatcgcacaacaactcgtttcgattacttgtttgttgtatatgatatgattcattaatcgtgatggatggtacagtggtgtggaatccatgggagaagaaatcgaaaacaatggcggattttggtgatgaagagtacaaaagcatgctttgtgtggatggtgcagcagtggagagaccgatcactttgaagccaggagaagaatggaccggccggctaatattgaccgctgttaaatccagtttctgcttcgatcaactcgaactacagagcaagggattctgactctagtttctgtatgcaacattggaagagcagagccaccgtttcttttatctctttctttttgttgattcttgttttatcacattagagcttatgacctggtgatttctcagaccagtcttgtgatgtagtgacagaaaaagcctctggtcttttttttcctcggcttaatgtaagaatgtgaggacaagttgtgttcaatcgattcagtttgatctttttaccaaattgattcatttttcccaaaaagagtttgcactactagctttttatcctcaacttccacaaacaacagcaaaatctaattaacaaaaatcttggagctttacgtttttttctctaactctaaagtttatgcagctcggcgatactctagctgtttggtgttttcttgaagtaccttcacaaagacagaagagccaaagacttagaaaacaaagaacgcttttcaatggtggaaagggaaaacttagaaagattcagaagtccattgttacctcgcgtattctctctgcaattgccttgcaaccttcagaagccaatgcaaacactgtctcaaatgtttccatcggtaacttggcatccatctacacattaaacccaaacgtaagcgtctagaatcatctgaatgcgaatgtatagaaatctgatatgaagagttgaagaaaaacctgaaggagtgacactttgtctaatttaggtagaataccgacggttacatcagctcctccagcactgtcttcaacatagttcagatcaagaagaggagtactgtttaaatatccagcactacaggaaacagcgagatcacgcattggaattc

SEQ ID NO: 116 - DNA, 104868 bp, Arabidopsis thaliana
gaattcatctttatgataaaatggatatataattatataaatctttctttaaaataggagatagagagagagagtgagaaaacagtactaaaaataacaacttgagagagaaacagtaagaaaagagagcaacaaaatgtggaacagaagaagtatgaggtcattagttgacttttaagtttactccactttcctacaacaacaacaaaaaacagcaaaattagtccacttccacaatcatttctctttttgatttacttctaacgatttttgttaaaacccacgattatgttacaatacctaattcatatgttggtaatttggtgtacatctgattagtttattaaaacgtgtttgaattaagtctttagtaatcgtggtgtgtggtgaaaatgaagagactgtctatatcgacatatgtgttgaatgggtaagtgccatggtcaaagcttataactagttttcattgtcttttgatacgtttctccaaaatcttttctatttttcagctgtattctgatatgaagtctggatgaaggattttaaaatggtttagaattcagaaaagaaatttactagttattttttaaaaatgaatgtgtgcatgtgtgagtgtgtttgctccatagtgtaaagaatgagaagtgagaagtgacttaatgtgcacaaaggtgcctttggcagaaagatcaaggcctggtccataacacccccaagtgacaaattagtatttgccactatgttctatatacatttttatcctttctttgtttattgtttttctgtgtctttacacggaccaccaaatgggccaaattgattagtgcatattgatcttgctagatcttcccacaatcttcacatcgtaatcatgttcttttaagaagaaaaagtgttgttttcacactcttaactcatatatagatacacgaaacacgatttgactacagcttctactctctaggttagttaaagtttttttattattttaaaagttattagttagatgcttttcataaacgatgcaagaaggtacccaaaaagaagttgcaaaaacaaatcttattagagtttgttttcattattatcgttgcgttttatttgtttacgagtgaagaaaagagaaacaaaaatatagttgctgaaattttagtatttataaaattcgcagcaatggatattagaacgtatccataatctgactatagataattctatatcgtgccaagaggaaccaaaataaattgtacatgtcgtttgattcattcctttaatttattgtgtaaagaaggatccaatcctaacaaagtcttcaaaaccttcacattttttcgaaatttaacgacaactatagggtttctagctagatttgaaagttttttcacagttacacctttacctatctgcagtaatacttccacaaaactaacgttaaacttctgccggtacaaatacatgtgcttatgtaagaatgaaaacattttgaatttaatattttgcactggacacgtttttcttttgccattatggattttcacatagtgacggatacgtgtagatccgccgatccctatgacaacatagcattttggaatttgtttacgttcaactcctttaaataaatagttaaggcagtgcgtcactatactgcttattactacatagtctaatttggtatatgctttgattatggatttatgataatcaaaagttatatggtataaccaattgtcgttagctcaattggtaaagaccttaggcgaagcttagaggtcgccggttcgtgtgatgtttgggacgaaactaatattacatgctgtggtttcgggcctgaggggattacgggcttcggcccaaaacttcttggatttcaaaaaataaaaataaaaaagttatatggtatattcttttggatatttcattctctttttaatttcgtttcgccttaaccgcattctctaattaaaaatttaggtacatgattcacacttttacagtttagcaatgtatacagtttcgaaacaaattcagtttccaatgcccatgaaaacgcgtataataccataaaagtttatgttctcaaactagattgagattagtggccaattgatcatgcatgttccatttaactgaagatatacgtaaacatgatcaatcgtccatgagaacaatttcagtcttgctacactaaaatgcaacggatcgtaaaagtgatttatattttcatagaaccaccacataaataattaacaattgaattcagatcttaaaaaacatagacaacagaaccaattttgttctaaaaaaaggcactaaggagcaatgtgatcatatagtttaatgagccagcaactaatcgcacacttgtaatataatggaatatataaatatgggagtagctagctatataaaccataaagggtaagggcatatgatcgaaagaagaaagaaagtaatgcatatggagctgagatcagtatatagctttacacgttaaatgtagttagtgcacatgacgaaaaactaaaaataatacacttgagataatttgcgttgatttttaattttgaatttgtagagtgagtgtattaggtaaaggacaggccactgagaaactgcgagaagtctaggctaaggaaagtagagagacagacctttcagtgtttcaaaagcaaagtataattactaaaggtaaattataatttttaaaaatgatcatttatttattcaaatatcaaataattagaagacaatctttctaaaataaatataaacaaaaaatgacaaaaaggttacctcatgtggtatgtcattttcagctaacccctctggttgccagagtaaataccaaattaagtaactttttaatttactaatgtataattgttatctttcgccctcctaaatttataacaatatataatatactgctaaaaaatatataaaacttcttatattagtaatccgatatgttggttaaataaaataaaactgaaataatcatatttagtctaggtacaatattaataacgccgggtttaaaaaatcatttaattggttggtttatgagtaagacagcattattattggtgttatgatatttcattgttttttgtgtttgcaagttctaatttttgttttttctttcttttgcaaataattaaattattgtatatttaatactcacatagtaaaaattaaggaaataacacgcgctaacacgcgcctcaactttaatcattttatttattcaaaccccatttcggaaataaaaatgacaaaaaaaagaagaagaggaagaaaaacagcaaaaacgtctactcttctctcatcctcgcgcttgctctctcttctcttttttgtctttccctttcgtctctctatctgtctgtatcattcattcgtgtttatttacaatcgaaccacgaaacgtctcttcttctctataaaaaccagatttttctcaatctcaatctctctcgctctcgctctcgttttctttgatgaacccttttacttcattcttactcttgataaatccaaattcccgagaaacccatttcatttccttcttctgtttctagaaagacctcttcttttcgataaaccgagatccacgaaacccgcatttcctctcgctaatctattctaaatttcgatactttttttttttttttatcggtttgaatctcgagaattccgaagattcagagtctccatagtcgaaggtgtgtagcgaatcgagatgggtttctgtttgatttcactgtcgctttctctgctttcatttctgagtggttcattgatctcttccgtgttcgtaatctatgattgatgatgtatgttgttatcagatgtttgattgatgtctgcctatagtctaatttcattattaagaacgttttttttttgtatacctaacatctaaattttgttgtattaattgtcatcagtggaatcttgacgttgaaaggatgacacaagctttctcctttttgtttttcttttgtctgaaaaatgtattgcaatgttagacaaagtcttaatactatctctcttcttcgtcttctgcattttcgatttaccattatgcatgtatgctaaagcaaatctgattgacaaggttttctcttgatttatgtattgttgttttgtgttgttgaaatgaatgatatttgggattcagattcgtaaagctttaaatctttatgtgttcttttcttggtaatggatttatttattttttgtatcgttgtttcagaggctcttgagaatggaagcagaaacgtcttggaccaattatccgtacagctacattacatatgtccctgaagctgaatcataccgtgagcagagcgacgatgaagccaaagtcgaaaccttttcaatggattctcttctccctgacgatttattagaacgaatcctctcgtttctacccattgcaagcatcttcagagctggtactgtctgcaaaagatggaacgagattgtatcttctcggaggttcttatgtaatttctccaacaattcggtttcccaaaggccttggtacttcatgttcactaccacggatgatccatctggttatgcttatgaccccattatccgcaaatggtacagtttcgatctcccttgtatcgaaacatccaattggtttgttgcttcctcttgtggattggtttgcttcatggacaatgattgcagaaacaagatttatgtctcaaatccaattaccaaacaatggaggacgcttattgaacctcctggtcacaaatcgacagattacacggcaatgtctacctccgtaaaccgagcgaaccaagcagtaaaccgcgcaaaccggagttactcagtctcgatagtgaaatcgaagcaagttccagggaatttcttccaatgggatctctctattcatctctacagctctgaaacaatgacttggacaacattagtaaacgatgtcttatccggatggagaggagggaacgagagtgtgatctgcaacaatgttctttacttcatgatatactcaacgggaggctcagatcatcgccacggcttgatcgcttcgaatctatcctcgataggatcaccgtcaagcggaatcttgatgaggagtttcattccaatgccgtgttctttaacctgcgggagattgatgaatctaagagagaggcttgtgattgtcggaggaatcgggaaacatgatcgaccagaggttataaaagggatagggatttgggttttgaaagggaaggaatgggtagagatggcgaaaatgcctcaaagattcttccaaggttttggtgaattcgacgaggttttcgcgagtagtggcacggatgatttggtttacattcaaagctatggatctcccgcgcttctcacgttcgacatgaatctcaagtattggagatggtctcagaaatgtcctgttactaaaaagttccctcttcagctctttactgggttttgcttcgaaccaagactcgagattgctccttagttgcaatgaagaagcaaatgggtctgtgaaagtcttggtcttttggattgtttttgcacagagaaatcgccggcggctttatgaagatgatgatacggtaatgtttttaaattttagttactggaaatgtttttcaggaatattgttatttgcaatttggtactctgttaattataaatttataaaatgaggcccagatacttttatttgaacaaacgaacccttctctatctctcagtgaaatataagaacatttttcaacatgtggcccacaatatctcatgtaaatgggtcggattctgaaactggaggttgtcttgttgctgttcctggtggataaaaataatgattttgttccttttttttccacatatattcataatgatttttcatgttttattaattaattattgttgtaaattattttaaagaattatgtttctgtacttgtataaaattgggacctattttcgtgatgggatttgtcaggtttggcagtgttaggtttacgggtaatggacaacagctattttattgtgtattttatcattttctcaagggtcacttattttcaattttcatagctataataatttactaaattttaaaatataacaaaatgtcattcattagttataatcgtataaaagttgacgaagtgatatatagattctacatactaaaaacaaaattaatttgtgtcattatgccaaaatgtcaaaaggaaaagaaaatttagacaattactctgacacatcaaatcagctaaaacctaactaaatataccaaactagcaacacatatttttgttattaaaagcatttataatgataaatcatgatcagaatcatagtaagcagattcgaacactagtctctcaaatttcggtagtaaagttttcaaccattagaagacaaatacgattttaacatcattagtattgttttttcttttttaatttaagcgttggctttccaaaatgaaatagtaacaagcattaacgagttaagttgtcaatgggggaagttaaaactctttaaaaccaaaaaattgaccacacaacacatatagtgcccactagttctctcaaacgaatatggaatactttaaaacccacctctattctcaagaattaaagcccagaatttcaacgttctaaaaatagttttgaaagatttgtttttcacgggtttttcgtaaaataattatgaacaaaacaaataaattcaaactaatttttacacgtacaaatctgactcctagcctcctagatgaaattcaaaattttgtaccagcagctcaaagctactaggtaaaaaatgtcacgagagaaaaccggaggaatattggtggttcatcaatacgaatcaaaccgaaccaagtcataaaccggttcatagaaagataagaagacagacaatcagtcatcactttggtctcgttgagcctttcgtctatctctcacctgaaagaaagacgttcagctttctctttccaaaatcaaaagctctccgatcagtttctccggcttaggaaattaattgaaggaaggtgatgagaggtactactgagaatacggatctgttcgatcccaaaacccaaatggatcctgacttcactcgtcatggttcttcctccgacggcgattttggattcgcttttaacgacagtaacttctctgatcgtttgcttcggatcgagatcatgggtggaccttcggattctcggtctgaagttgaagggtgtacgagtatcgctgattgggctcgtcatcgcaagagaagaagagaagatatcaagaaggaatctggtggtatgtaatttgttcgtatggtttagggtttttgttattgaagtcgaagtccaagtctttttgggttttaatgttgtgatttcattttgcagtcacgatttcagacattgtggcatgtcctgaggagcagattttaactgatgaacaacctgacatggatggatgtcctggtggtgagaatcctgatgatgaaggaggagaggcaatggttgaagaagctttatcaggtactactatagagcaacatcctttggcgaagttttagctgtacacaaaggagcttgttttgttctgagaagtgttttatttatttaatgtttaggtgatgaagaggaaacgtctagtgagccaaactggggaatggattgttctacagttgttagggttaaagaacttcatattagttctcctattttagctgccaaaagccctttcttttacaaggtatctaaataggttgttgatggattttgcttttgctctcatgtgtaccttactctttaatccatttgtgttctttttttctcggaaatgttgatagttgttctccaatggaatgagggaatctgagcaaaggcatgtcacccttaggattaatgcatcaggtacgccattgcaacattagctatctgaacgtgttattgatttatcacactagatacagttgtaccgttctctattaggtccacagaatcaaaatatggttttgatttgagtttgttaaggtaacttggagattcttagattgatttacatattatactctactttgtgtgtattacagaggaagctgctttgatggagcttttaaactttatgtatagcaatgcggtatctgtcaccacagcacctgccttattagatgtgttgatggctgctgataagtttgaagttgcctcttgtatgaggtactgcagtagacttctccgtaatatgcctatgactccagagtctgccctgctctatctcgagcttccctctagtgttctaatggccaaagctgttcagcctttaactgatgctgcaaaacagttccttgcagcccgctacaaggatattaccaagtaaagcccctgaaactacatatccatgatattactgtaatcaagagcacatgagatggtggggcgattcttataaggcatgtctaaactttcttttccaggtttcatgaggaggtaatgtctctacctttggctggaattgaggcaattctatcaagcgatgaactccaaattgcatcagaggatgcagtttatgattttatcttgaagtgggcaagggcgcaatacccttgtttggaagagcgaagagagattctcgggtcacgccttgcactctccatccgcttcccattcatgacatgccgaaagctgaagaaagtgctgacttgcagtgactttgagcatgaaatagcatcaaagcttgttctagaagctcttttcttcaaagcagaagccccacacagacaacgtagcctagcctccgaagaatctgcatccctgaaccgccgcctgatagagagggcttacaaatacagacccgtcaaagtggtcgagtttgagcttcctagaccgcagtgtgtagtctacctagacttgaaaagagaagaatgtgggggactgttcccgtcgggtagagtgtattcgcaggcctttcacttgggaggtcaagggtttttcctgtcagctcactgcaacatggaccaacagagctcgttccactgtttcgggctgttcctagggatgcaggagaaagggtcggtgagtttcggagtggactatgaattctcggcaaggtcaaagcccgcagaggatttcataagcaaatacaaagggaactacacattcacaggagggaaagcagtaggttacagaaacctgtttggggtcccatggacgtcttttatagcggaagatagtcaatacttcatcaatggcattctccatctcagagcagagcttaccatcaaaaggtctacagatccttagtgaccgtttacttctcaattgtcactgtctctctttcctttacctgctgctaaatctctcgctctctctaacttgccttttttttcttttcttttataaggcttgaagaagactaataaagcttataaaagtaaggttaaaaacgtttcgacgacaacgttataagaagaatgtaaatgcgttctttttttctatctacccttactcttttggctttggattataagtttaactcttcaatgaaattcttagcgtagagattcttgtattatgaacgaagttgtgaacagaaaagaacgaacgtaactctctcgtctcatttaactaatttatctagttggattgaaatagacatgacttttcgatttgggccatgcgtatgttgttggagttggactattttaaattcctgcaatcaatttcaaaaaaattcaaatcatattgaccgttgattatataccgtacacgtggtacaatgtcacagatatcttattataatactatacagttcacagtcctttgttttctttattagacaatcatgagacaaagtactgtaataaacaattaatcatacatggaattgtgaagtaacttttttgttactcttttaccagaaatgatcaaattttacaaatgattattttttgttctaaaatttattttaatgtcttagattaaggaaagtaaactagttttgtaataaataaagaaaaataattaagctcttaaatatgtataaatgattatgcatttaagtattaagaaagtgcaatagttttttttattttattttataatcagagaatcctcgtgcaccaagaatctagttccactaattaaggtgttattcttctcctctaacaccaaattatgtttgtatctcttatttaaattcattaatgacaggtttgacattaataaataatattttaaaatataaaatacattagtaattaaaattaaaaaataaatgagaataaagagtttcatctgtatcccgacggaagttgagttctgtttccgcccatttctatctgaaagcaatgcacgtagcctctctcgtccatctccttaaattcaacaagtatttaatctcttcctttaaatataaactctcaagttcatcaaactgtttccataagaactagtttttcttttcttcagatccaattttataaagcaaacctgagatttttattaatataatatatatattgaaaaacttccaaaaatgagagttatctgggtttaatttaatttactaaacatcaagatagctgttttgctctttctatcgccatgtgttcttcttcttctccttccttgtctcttttttttaatgtttttttgtttccttgagtgaagagtgtagaagctatagatttccagatctagtaacatcgtcttcatgagatttttgtgacaaagaaaagctcttttgtcgttttttcttctcttttggctgtggaaaaaaatcagaaaacttgtcagtgtgtaagttgttgaggttttcaaaattgaaaatgggtcaatatgcaacagtgtgggatcaaaaagaagcaagtgagataatcaaagattggaatggcgttgaccaagtccttctcagaaacccacatggtgcttctgccaaggtcttcactttttctccaaccattcttgtctgataaaaattcgagcttcttttgcttattctgtgtttgattttccagataagtttacatggaggacaagtgatttcatggaggaatgaactaggcgaagagcttcttttcactagcaataaggtatctgatctcactacaaaaccctgatacattgtgaagaatctgaaacataaaaagtaaaaatctgatttttatattgttatgaatttgttaggctatattcaaacccccaaaatcaatgcgtggagggattcagatttgttatccgcaggtaaaatttactagtagcgctcactgaactgagatcttttgttgatcactttttcattgaagttttgtgtgtgtgtttgtgaagtttggggattgtggatcactggatcaacatgggtttgcaaggaacaaaatttgggtaatcgatgagaacccacctccacttaactcaaacgaatccttaggaaaatcctttgttgatcttcttttgaaaccatcagaagatgacttaaagcaatggcctcataggtaatctcctcatcacttgtttcttcattttttcctcttgacagagattctaaaattctatgcttattcccttgcagtttcgagttccgtcttagggtttcgcttgctgtagatggcgacttaacattgacttctcggattagaaacatcaatggcaagccttttagcttctcatttgcatatcacacctacctctctgtctctgacataaggtattactcttcaataagtcaagcaaaagattattcagtgtttggtgaaatctttataacccaacaatgtttacttttcttctctacagtgaagtgagaattgaagggttggagacattggactacttagacaacctcagccaaagacagcttttgactgaacaaggcgatgcaataacctttgaatccgaggtaaaccttaacaagattctgcagttatcgatagtgaacaagtatctttgctcggttacttcatatcagaagtttcttttgattcatgtttcagatggaccggacataccttagatcaccaaaggtggttgcagttcttgatcatgaacggaaaagaacatatgttatcggaaaggaaggacttccagacaccggtaataatcgcacaacaactcgtttcgattacttgtttgttgtatatgatatgattcattaatcgtgatggatggtacagtggtgtggaatccatgggagaagaaatcgaaaacaatggcggattttggtgatgaagagtacaaaagcatgctttgtgtggatggtgcagcagtggagagaccgatcactttgaagccaggagaagaatggaccggccggctaatattgaccgctgttaaatccagtttctgcttcgatcaactcgaactacagagcaagggattctgactctagtttctgtatgcaacattggaagagcagagccaccgtttcttttatctctttctttttgttgattcttgttttatcacattagagcttatgacctggtgatttctcagaccagtcttgtgatgtagtgacagaaaaagcctctggtcttttttttcctcggcttaatgtaagaatgtgaggacaagttgtgttcaatcgattcagtttgatctttttaccaaattgattcatttttcccaaaaagagtttgcactactagctttttatcctcaacttccacaaacaacagcaaaatctaattaacaaaaatcttggagctttacgtttttttctctaactctaaagtttatgcagctcggcgatactctagctgtttggtgttttcttgaagtaccttcacaaagacagaagagccaaagacttagaaaacaaagaacgcttttcaatggtggaaagggaaaacttagaaagattcagaagtccattgttacctcgcgtattctctctgcaattgccttgcaaccttcagaagccaatgcaaacactgtctcaaatgtttccatcggtaacttggcatccatctacacattaaacccaaacgtaagcgtctagaatcatctgaatgcgaatgtatagaaatctgatatgaagagttgaagaaaaacctgaaggagtgacactttgtctaatttaggtagaataccgacggttacatcagctcctccagcactgtcttcaacatagttcagatcaagaagaggagtactgtttaaatatccagcactacaggaaacagcgagatcacgcattggaattccagcatctgctagagctagagtcgcggcattgatacaagctgatcttgttcctgattacagaacataacactaatggctgatcagagattgaaagagatcaaaaggtcaacttcagaacagaggtttagtttaattttacctccatcagcttgtagaacctgaaggaaaatatcgatctgcataaaggaaacaattcatcaggaagcaagcaaaaggaggaggaagaaagaaaatttagatttcaatatcgccggagagtaaaaagtaaacctgagagtgaggcatcaattcggttaatatgcaagcttccattgtctgacggatgacaagagatagctctgttgatcgcctgaccatcataatacacaacaattcaaactttatgattttcgtaagaaaaagcaaagagtctctcagctatatagtaaaatgtaacctgtcgaatttctgtcttctacgatcaccagtactaaactgagccatactatactcacacaacacctaccaaaacatacaattagcaataagcattccatattcaccaagaacaatactaaacaagatcaaagcatatacataccactgcatggtcgttcttcttttgctggctcttgttttgaatctgaaggagcacattaacagaaataaccaattcgctgaattatacaattaaagtatcaatcttgataggtgagtaacagagtaatcaagtacctctcttggaccataaacagctgcaattactttggtattacccatctcgaagacagcagaactggaaacaaagttggaatttttgttcatataaaagtgccgaatatagaactgagatacggaaaaagataagagacagattttgagttttacccgtcagccttagaaacaactccaacttcagctacgatttgcctcatctgagattcattacaagcaatcacgaatagaccgattaacttgtgaaggcagtggcttacaaagacagtgaatagagatgcaaacatacctcgttgaatcggcgaccatctaatcgaagaccttcagggtttacgtactccattgttgtgaactctaggtagagataatcaaggatgagagcaatgaaagacagaaacagaacaagtttaatactttctgatcccacagaacagggaacaagagacgaatttacctctgccagtactttagcggcggcgatatgacggagggcgatggacggcgtcgagagaactgaaagagtgtcgacaacataaagattagggctttttggttcctttttgtgaattaagtgagattttaagggtaaaaccgtcaaatcacaggaggatttttttttataacttctagtttatgaagccaggcaaattggtaattcgcttgcaaagaaaagtaaagctcaaaattgcgggaacatgcatgcaataagagaattaagagtgagatcccttcaaaagtatagctcaaattgttgttgttttcttttatcaaggcttttcttgttgactctgttatttcaagtatgtattagtaatagtaatatagtatctagatcaatttctaagtcaatagtatattgatagtagtatcaacgtgtcgggagttacgtgtggcaatgccgacaaatgaatgcaaagtgaggtatatgaaaatgacgggttcctgacggaggagatgatggaattatttactaaggtttgctaacatcttctttttttatgtatgtatgtttggatcaaaaagtatacaaaaccatattagacaatttaagagagaccactctctagtctctacctagtaaaagtagtacctactacgactatcctaacgaatgtcatgcaatttaatgttccatatacaatttttttttttttaatatattaaaaacaacccaatagggcatgggctaagacccaatacacagatgaaatccagttacaaaataggttaaacagaaaaagtcaccgacaaacaaagaggttcgaaccttgctgctggtcggaagcagagtggtcggagccttatatctggcggactcaagcatcacagctttgcggccgcagacgacggatcgagaaacgcagctggaagattccggtttccatctgcacctatctccgccgtcgcaccaacccaccacaactctcccagaaagctaaccactccgacttaccggttccgcgatatctgttccatgccaagcaacccgatacactagagtttaacccctctccgacttaatgttccatatacatactactaactattattaaatcaaactgactgttatttttaaggtctaacttttaacacgagtacctgactaatcccacgtaaaaaaaaagtcttgaaatcacatgtatctttttataaaatcacaggtgaattcgtgtaagttatataaggttcaaaataaaacaatatagaattactgtaagttacaagatttggtatattaacttgtagaattatcgatataataaaagcttatttttcaattattattttaggaccaaatctagtcaaagctcaaccattaactatggaaatctaatttctagttacctttttaatagtagctttttctaataaagtttctgataagagacttggtctccaagcaaaagatcataaattttttccgaaattaaaaatatattttaatattaaagacgagattttattactctttcaaacacatcgttagattcattaccattaaacttcacaatttccatattgggtcaatgcgaattgacacatactcgtgaccaatctcacacgcgtggagcccactagccggcgcgtgtagcaaacgtaaaacagaccgcgcgtaaaagagttaaaagttgcttggagaccaagctatagattaggacaattggctctactttcggtacggtaactaccacgtgtcataaatctaacgtctcaatctgagatgcggaaagccgtttctggatcccccattggccgccacgaaaccgcccttaagcatcgtccctctttacattaaatccaaatctaattcccggtttataaactccattaaccggattaaatttcaataggttaagctttgataaacgtatgtcatttcaccaactatattttaagatacgtttagttataaggttgaatgagttttgattgggtcagtgtctcatatcatatgaatagtgttgaacacgcatcaatttctctgtaacagttaaaatctaattaaattaattacatagaaaaaatcacgttactaaacaaaaatctccaaaaatagtgatgagttaatagtatttaagaaggatgttcctgagaaacggcgattcttctttaaccttttgactcttcttctctctctctctgcaaattcaaaacagtgaaaaaaacctctcttcattttttaactccctctctctctctctctctatggagagacgaacgagacgagtgaagttcacagagaatcgtacggtcacaaacgtagcagctacaccatctaacgggtctccgagactggtccgtatcactgttactgatcctttcgctactgactcgtctagcgacgacgacgacaacaacaacgtcacggtggttccaagagtgaaacgatacgtgaaggagattagattctgccaaggtgaatcttcttcctccaccgcggcgaggaaaggtaagcacaaggaggaggaaagcgtagtggttgaagatgacgtgtcgacgtcggtgaagcctaaaaagtacagaggcgtgagacagagaccttggggaaaattcgcggcggagattagagatccgtcgagccgtactcggatttggcttgggacttttgtcacggcggaggaagctgctatagcgtacgatagagccgcgattcatctcaaaggacctaaagcgctcacgaatttcctaactccgccgacgccaacgccggttatcgatctccaaacggtttccgcctgcgattacggtagagattctcggcagagccttcattcaccgacctctgttctaagattcaacgtcaacgaggaaacagagcatgagattgaagcgatcgagctatctccggagagaaagtcgacggttataaaagaagaagaagaatcgtcggcgggtttggtgttcccggatccgtatctgttaccggatttatctctcgccggcgaatgtttttgggataccgaaattgcccctgaccttttgtttctcgatgaagaaaccaaaatccaatcaacgttgttaccaaacacagaggtttcgaaacaaggagaaaacgaaactgaagatttcgagtttggtttgattgatgatttcgagtcttctccatgggatgtggatcatttcttcgaccatcatcatcactctttcgattaaaaatctcttcttttttggggaaatttttgtgtggtgatgatgacgtggatacatcgtgaccgtcggcttaccttttttagtctgaatgacgtggactgttcagatcaactgaagcgcaaacccaaaaaaactagggttttgttttattaatttgtgggtaaatattttagttaagaagaagataagtatgttaatgtttatcaaggtttggacctttcgttgttttggttcctctctctgagattgtctcaacggtaggaagcagtatataaatgtgtttctatgtctataaattatttatgaaaaacaaatcgtatggaattttattatgattatgcgacaagtgaaacaagtctttacttcgaagtaaaaaaacaaaaaaaaaacttattcacaaatagaattgtcagaacagtcttggaaattcaagaaaagtcatgatcttgactaattataaatgaatgattgtatcatattattgatatcatcttttgtgattagagatcaaaaaatatttatatatatagtactttaaaatataaaaaattatattttaaatagtaatcaccatgcaccaacacctctcttcttctttttttttttttttgcatatgcaattgttgttttgttgtgacaaataaaataaaactgtggtgctcctatctaccaattattatgaagcgatgtcatggtttacttatcgctttctacaaaaatgttctcagtcatgtagaattggtgctggttttgttgagtgtattaaatgtaaatccgtatcctttttttatatataacataaatctttaatataaagtatgtgacaaattgtgaaaaatcttatgataaataaaatttttaaatttttaaattttatcatggagttattttttaattaatatatggttgataaaaaaaaaaatctaaatttaattcatactatagactccatattttttatacggtagatatatgggttgcatgtggattacgacaacgacgcagttcgttttttactccaaacataagattaaattcgaatttaaatttgatagtaataaaacaaacatattcaaaaaaaaaaaaaaacatattctaaatgggttaaacaaataatatatatggtcaaaatttaactgattatcctcgtatagatatgagtgggtgtagggtgaagtgaagattcaaggtatcgccgagggacatgttatcgtgtctgctgttgttttcttctacttaagtaacaaagcccattcatgtgaaaaaccaaaccattgaatcctatattaaccctaccaattgtgtctccactcataaaaacatccttcacgttctcatattaactataacagataaccaagtacttctaccttttcatatatgtacatatctatatatatgatacaataaacatttgcatcctgtcaaaattggtcgtagtctacgtatagaaagacaatagagtttggtatacatcagtttcgaaggacaaagtgcgttgtcttctaattaaatggctgttttctgttttgtaccatggtccatccaagaaaatgggacaaatctctagcgatctaagctccatggcctcattcatcgaactttagctcaatacttcaatataaaccattataagtttatgtagagttataaggacaattgaggatacatatacttcaagaatccctttttttttgttgttgtcaaaaatacttcaagaatccctatttagaaaaatcttaactaagaactaacttttgcttctcttaataaaataaaataaaatcggccatcttaattcttaacacccctcttaatagtgctggttatctatagatggggtaaatgacatgattcggcccctccaaaaagaaaaattaaaaaacaaaatggcatgattaaaagaattggattatctatctctatacaggtgagtcttccaatagatttgaaatttcctcacgaccttgtctcgttgatcttattccctgtcttcactctattttcctttctatagttaatacatttcctcccccactaatttgcaaatagaatttggaataaaatatctcctccctatagaaaaaaaaaactaaaatattatcctcacgctataaataatcaacaaaaaagactaaagagagtaacacaaacagtttggtcttttgaaggtcaatattttgaccaattcgacaattttcgatcctttgcagcatttgatattccccataggtttggcttctcgagtgagaaactactcattcagaagcttcctggtcacgttcatgttgttttttaaaaccttaatattttaaaaatacatatggtgtgaagaaaaaataataaagatgtgtgtgttcttatgttagaagttagagacagttaccctgagtacaagtaagtactgagcgcgggaagaagagagaaatcagatcagtaaaatataagggatgtagttagtatccatagtgaattcaatatcgaatgtcctacgcacctattttggggcaaaaggataacaagaactgcgaatccatttatttgtttttgtggttatagtggatggacatgattaaatcttcttaccagtagagttgtggaatccgaaagaatacgcacaaaaacaaaacatagagattgatcacatactcagaaccacttgcaacacacatgtaaaacatcggagcatttaatgcctgcagcttggaccgaccatattatgcaaaacaaaggggaacaagattcaagaaattaatacgaataataatcaaatattcaattcaattattattatgagcggtgacccaattatgtttctgcatttcaattcaaactgggtggataatatactcgttcgagactgttttttaagtttctaagagttttcaataggatgtataacaatttagataaagcaacatgtctaatataaaaatgaaaggacaaacttagcttaattaaaaaaataaaataaaactcagctttaatatgtttaactaatttaatatgactaaaatgattatgatctgatacagatacaggtttattgcaatcttgatattttttcagttgaaatttcgagtaactggattcaaactgaattagaagtacattaaatattatagatgagtaataagagcgggtctaataagcccaaatatcgtgcacaacgaactggtcaaagattgggccacaaaagattgagaggtgaggcaagttgccactggccacaaatctaatctactacgggccccaactagatctcctcaagacaccccctttacagatttcataccgtttattatactcttgttttttctttttttgtaggtcaagaagaagaataaaataagaaaatgaatgaagcatgagtcactctcattcatgtttcaaattgggtcattaataagagatttcattcttgttgaaatagaaaatccttattctcaaatacaccaaattaaatgtagttataacaactttgcggtaaaaatcttcagagtaatttacaatatttgttatcagaacctcacttggtatagtatatacataccatcattgacacttctaatgtaaatgggctcctttcaacaacggaaaacttttggcccatataaggcccagatcactgagagcacggtatctaaaatgcgtgtcattcaaagcgtttttgtctatagaaaagcgttacaacatgcgtttactttaaaacgaaaacgacgattagatttgaacggtacgtttatgacacgcatttagcaaccacgcgtatgcgcatgcttggtgagacttttggagcatgtgtgttaataacagtaaagtaagtaacaattttggaatatttttaaagtattggaaacattggcaataaacataattaaaaggggtacgtttacaataaacaaattatataggagacataaatcaataaacaaatctaaaaataacaaaaaagatatctctaatttctgaatattagcgaaagaggtttgtgttcactgaaaataggaaagttgaaacactaaagaactcataaactctctcaaatttagaaatccaaaagattagaagaaggtgtaggaggaagaagatgcatcaagaggatgaatgagatacgtcagcaccaacgccaccaccattagcaaatacgcgattccttgatcaatcgatgttcctgtgttatcaatcatcaaacaatcatagatttaatttcccccaaaattaattgattctgaatgcaatgttaagagaacaatatcagatctggtgagagaatgtggaatcggaaaacattaccgtcgctagtgggggaaggagcaggagctaaggattgagcgccggcgaatggagagatgacggcgaaaacgaaagcgaataaagcgattacggcaacggagttcctcgacgccatctcaagattttacggaggacaaaattgaagaagagtacgagagagagagagacgaaatctgaatgaacaagtccggcgagagagacgacgaacgacacggacaaccaaaaacccctttggatcatatatatggctataacgcgtttttatagtaattgactgtttaccgggtatagccggtaatccactctagaacttttctgtcaattgttcaaaggagttaactgacatgtgtcattttctggctaaatgaccgttcctagttggttcgtttaatttctttctattccctcaacaaatggaattggaatttattgtaattattatcaaatttagctttaaactaaagttatggctaatttaacacgtcctctgaattaaaatttgacagatattacgcgttgagagctctttcgtgtataggagcattaaacaggggtggattttattctttgaaaccttaacatgtgtttcttctaacctttgtacgaatccgtgtccatatgtgcatctcccatttgaaatctcttttcttttgctactattactattactacaacacgctttaattacacaagagatcaactagtttttgttccaaaactcatactaatattttgacaataaaacttcaccttactagatattttctaaacctttctacataattatgcaaaaccaaattgtaattctctctccagcctccacatatatttctttaaattctagtatggtactactactagcataattatctatttgtaaataaataaaatatcatttagtaccaaacatcacaaaagatgtttatagttagggaccagaaaaacattgcagagggaataattgagttacataatagtaagaaagaggccatgtgatgtgatgatgttgagattccccctttttcagttctttacttttaaattaaaaaaatggaataattcgccaagctgttccccttttttttaaaaaaaattattgatacgagaataaaaacaaattgttattataaaaatttatgctttgagtgaaacatatgtaacggctagtaagtaagtgttgttataggtctttagtcagattttggtttttactcgtaagattatgcttagtttcaaaataagaagaaagataaggacttagctaacaaacaaagtaacatacactttcgatatctaaaaagtaaaatctattcatcataaggccaaataaatcgcagttgatgtcggattgtttatcgttttgtcaacatctctttttattatttgcttactaatttacaaatactcgcgtctaaaacgacttcttggaaaatcattagtgtaatttgttacctaatcccattatattataaaatatgaggtccacgaaatttaaattcttatatagtaagtaaattcaattcaacttgcaaaggtttttttttataaatatgattttatattgttggttaagtttgatttgcttccagaacggcgtcgtatgcaaaaagaaactcaaaggagagttgaccgatagaatttactatgatcaacacggcactagtaaaagtttagatcacagcatatatacaaagaaaatagaatccattaaacccaattccttcatcaacacaacatgcttcttgctttctagagttttcgagtcttttaaccacacatggagaacatgatactccgatcacagagacatgagctaaaacacccataaatattacaattctagattccttctcctgaggagtgaggagatgcaactttgtgtgctctcaatcccaggaaacacacattcatctaacagactaaaaaactcatccacatcataccactattccaaggttttacgtgccaacacttactactgctcctaccaaaacccatttttaagtaatcctatgatcacctgaaatatctcagttaaaagtgaaacttcatgcgacttactctggtttttgtttttatataataatcagaacgccaacttcggatcaacaactcctgaagcattgccttcaccagtcataagctgttcagggtcctgagacagacacagatacagttatcatttcgagttcatccataagtaagattattgatgggaaaagcttatatacctccattccccatttgatgtaatctggagactcacaggccttgtattcatctaccaaactctcaattatgtcccttgattcgtcaaactctgaaagatcattgtcctgttcatatcaacatgtaactgtcaaagctgggtttgttgcactaaacatcagccaaacaaagccattatacttgagcagtcaacttacagcaaacatgggaaacttccggtaattgtctagaaaagcttgcttcttcctcaacttatcatattggctcaaacatttgctgaataggtgcctgatactagtgtggcttgctaacataagaccactgacctgaaatatcaaatacaccataaaataagagtctttgttgaatcttctaaagcaggaactagcagcctaagacattaactgtaaggagcggcaactctcagtatgacagatagatatagagtgatataagattaccctatgggcagtttgaacatatggggacttcttggaaagagcaacctgttgagagtaagatatggaaaaaattatgattcaagtccatggtgaagccaaaagcaataactaatttgcagacacaattaggttagaacctgtatgcttgcaggtccccactcaatgaaattaacaagctttctttctcgtatcctctgcaaactctcatgcacctagtatcaagtagcgaaataacagagcagattacatcagcaagaaagaataaccaattcatcctcaatgtgtccgatcaaaaaacagctaggtaaaagtacctgagtgggatcgacttctccttgaattatattcaatattgatatatactttgcctgactagcttctttgtttctagcataagacgaaaccatgatattttttgtctgcaaatacaatcatgttagaagcacaaccgattcaagtttcggaaaaagattggagaaggcaaacagctcacctgtagaagtcttctcataacatccagcacagtagttttacgaatgacatttgcctgccaagaacaagtcagttaatagagcaggaaatcaatcaaaaaaaccatttgcacactgtagaatttatgttcaagatacaatgatcgcttcccataaaattattttgtgatattaaactcgttgagatatcttacctggcgctcaacagtcaatggtgtatatccagtcatgaggaagtgacaccttggtgttgggatcaaagatgcaagcaagccaacgaggtcgttattcatgtatcctggataacgcagtgttgttgtgctagcagacatcacagtagacactagagaattcgtttgagcaaaggtaggatttgtcagatgtagacgctccacagcaatccttcccaaagcagtgttgtcaaggacaacaacacaatcagcatttaatgtaagccgcttaagcgtcaaaagtgagttgtagggctggacaacaacgtcactcgtttccatctgattgggaaagacactgtatgtctgaaccaacttcttgctgtagcgatcattcaaagtctccaacaaataagatcccataccttcatgtgaaagaaagagagagagagatggagggagtcattcacatcagaagaagcagtgaaaaaacatgagaatgctaaaagaagaaagcctcatcatttacctgagccagtgcctccagcaatagagtggcaaagaacaaaaccctcaagactgtcacttccatcagcttctcgatcaatcatgtccatgatttcctcttcaacacccttcccctggtgataaccactggcccagttattaccagcaccaccaccatggtcagcaacgaagatattctcgtgattatagagattgcggtaatcaccattctgaataccattgatgactctaggctccaaatcaatgaggagagctcgtgggatatagtgttggtcatccgcttggtaaaaaaacacatcttttctatcacctcccttcacaaacaagatcaaaacatcaaaaatccactaatccactaatcccaaatgggtattcaattgtcgattaatagaaacccagaaacaacgatttcgaatcaataagacctaagaaattcaagtagacaattaattataaagagaggcttggttggttcagaagaagaaggacctgagtagcgaagtcctcgagaataccatctttactgataccgtgctcgaggcaaagctgtttccagaactccataccgatctgattcccacattgtccaacctgaagcgtaattatctcccgaggcatttctaaacccagaaagttgttattgggtacaaaactagggtttcgagactgtgaggaagatgatgaatgatgaagaaatgaaaatgattaaattaagctctggcgcggatacctttttaaaactcgatccaatgctttaaagaatttttgcggacggagaagataaatttttgcatagattaacactaaaccatatgctctaattaaagccacactctctcagctaagctaactaacgtctgcttactcatattgggccaattataggcccgttttgtatttcttcagcccaataaatcttaaaaaggaagaattttgcatgtaaaggatggaataataacttttaactttaagattaatttttagagttttttgattatcaaatgggaaaaatgtcatttaaatcattagtttaccattttcgttagtttaaaatatgaattttgggtatggtgatttaaatccttaattttatgttgtttttcaatttaatcatgaattctcgttgagtaagctaattgagatacaaattcttctttttcgatgctatctgtcgacttagagacgaaaaattactttaaattaaaaaaagaagcaagaatccgaagaaaaagaaaaaaaaattggaaatctattttcaagatctaagattttttattggaagaatttctaacgacatgtcttaaccaacttagtcaacgaaaatttatgattaaattgaaattcaacataaaattaaaaatttaaattacatatttccctttatggtaaaatgataaattggaagagttcattctttaaaccaactaaaatggtaaaatgataatcacatatttccctttatcaaattcgtagtgtatctatattctccaatttccggattcattaacgagtaattaacaacaaaaaaaaaaacctccattaaaggtaaataatcgtcaaataaacataaacaaatctcgccagcttgactgttataagtccattcgaccaaaaacaaagactagaggaagaaaacaaaaaccttaaaacactttcaatagaagacacgcactcactgtcagaaatctacatcgagaaacacacttccactttccaaaaacatcattcatgaaaaagaccacagagaaaacgaagaatatggttgatgatgatgatcgtatactatgggattgtggaagtccactctatgattcctacgagctcgtttctcttactcacatcattgaacgccatttcatgtctctaccttctcttgctggcgccggaaaagtttgctgctctcgaagaccgtctgatctggaagaaaaggccaatcgtggggccaacaccgtcgttgatctgtgttgttcctctgattcgacgactggtaaactgttgtgcggtgcttttggaaccaaatggtggaagagaaagcaaaacaccgaagctgtcgtcgataattacaacaacaagaagaagaatatgttttgtcggatcctctctaagataaggatttctacaacaagatctggttcttcgaagatgtgattttcatatcttctttttctgtttttagtatttgtttgatccttcgtaaaataataattaagtatattacttgctcatgttttttaatttgaaaatttaatcgaataaactgtaatgaaacgggaaatacattttattgacttatggattaaatgcagagtaattagtttaagttgaagaatttcatggatttaatatccatcacatcatacgtctctgaaacgtttaggcaaagagtgaaacgtggatcaacatgcaatcaacgtttacattggggaatatgagatatatagcgatagaatgatataggagtcgtttagcaattgccattttactaacagttcatcggggtgtcagaagaaaaatatgaacttcatagaaaatcctcaagtgaataacaaaggacaaaacatgtgaagcaatttgaaaatttcatgattcttctgacaatattctaacatgcaaattgcaaatgattcttgactcagtcaatgatttaggtcttgggaacttggtaaatttgtgtaatttgttactctttaaaaaagtgttgagtatgcgcagatgggcttcttgaataaaagtctgtaacggcccatctctataactttgaacagaattaaaggctatattgtttccgttagaatttaccttttcttgttgagtatagtttagccgttacaacataaaatgcttcctcaataaagtattaaagcttatgataacaacgagcatcttcgaatttgttcctccatatactttagtttatatcatataagtagactatttttgaaacacttatattaacaacattgaggggtgttatattacactccaattcacatcatcaagagtacaaaaggctgctgaagaaagaaaagagaggaacaaatcacaataattaaaatcacaagaaagtgtaaaatgaatgcgaaatagaccaatagctataattgcataatccattaccaattgttgtctcaaaaagcagttaagtctctcgtttctatggttctccatcaacttcagagatcttttatgggctccacattttcattttaaagttttataaatttaattactttattaccaaaagaagcaattttgttaagatcaaagtaaaaaatcaaatccgtaaaatgatccacctaaattgcttcttcttcctctgtggttaacacttagacttagtagtaagataaagatccaatttcttaaagtgaaagtcataaaaaagagttagaaaaacagtcaaaagaaacacacacgagaaagaaaatgtggtgaagcttcgaatgggttgggtcgtttggtgtggcattgggctccaccaaagtatacacatggaccactttaatttaacgtttcgtcgtctttgaccttttaatttacgaatatttcctctctctctttatatttttgtttgccatttcatttctttactttgttttaattttctctgccattttgatttcgtgtaattgatgaatgctataaatctttattctgtcacatcttttaacaaaggccaaaaccctgcttttctttttacctcagtggtcgctgacatagaagctataaagaaaagctattatgtatatggttgttataaataaagcaaaagcaaaattcccccaacttatttattttcttcataatccactaataagtttcaaaatgcatactgaaaaaagataaaaagtaaaaccaaccatttcgtattttacaacaataaaaaacaaaaaagagtgtgtgaaaatggaaaaagtacacatcagcataaacactactaataacggcgtagaagaagaagcagacggaactgagagtttcgccgttaggaagatacggaccattgtggtggttgcgtcacagctcagagaggaataatgaaaacaaataaccaccaagtaacttacagtaaaaacgctcactgtaaaaaacgccgtcgtttcaataaatgttggtagctgctaaaacgacgtcatttattttctgaaagagagagagagagatgttttatactacttcttactctgtgccgtgtggaaaggagcgaaatttgcagaagaaacaaagcataaccccccagagaaagagagagagtttctcccaacaagatcaaacttcgaactctacgagaactactattatccaaaacgcgaaatagagagacagagatttcataaatttcttactttttaaccccaaagttcttttccagacagcgttttcctctgtcctttgctctttgtgggtttactccttcttccggtttggatatcccgagctagtaaagaagggatccagtagcagaagctgaagctaataaacccaatcatagagaaagctctctgaacaaaaggttcagtttttctctctttcttcaaaactgaaatcttctttgtgtgattcattcactaataagtcgtcattctttcttctccttctgatttctgtgtactttttctctgtcagacattttctgggtttgttttaattaaaaagaaatggccgattcgaccaaagtaaggctagttcgttgcccaaaatgcgagaatctcttatcagagcctgaagattctccctttttccagtgcggtggctgcttcaccgttcttcgtggtaacttctcttaacttttttgagtttcaaccagagatgcccaattttgtaggatttgatgattgtgcttttgatggaatcaatgcagagaatctttttttttagttcttgtttgtgatgttattagcgatctggttttgtttaattcgaattaagtagctttttgtatttcttatgcttaccctaatgagacttgtttaacatacagccaaaaccaaggagcgtgaagcagattctgtttcagtcaagtccgttgaagatacagccaaaccggtttcagctagttccccagagaaagcaatattggattctagtgaaacttcatctgactctgatgttccatctttgagacaccaccataatgttgttcctgttgatgttgagagtgatccttgttcaaaaccttcttctcttgaacaaggtaacagatctatattattaggggataaagatgaccttaaatctcaatcagggagacaacaagattcgggttgggatcggtttaggaaaagaacaaccaagagatgtgattctcaaagtgtcatcaacagattatccacttctaggcatccttgtgatgaaggcacttcttcttcagcaaactactttccagattcactccttgaattccagaaacacttgaaagatcagagcaacgaagcaattgagcaagaccgagctggacttctgagacagttagaaaagatcaaagaacagcttgttcagtcttgcaatgtggcaactgacaagtctaaagaacaggctcctagttcttcgtccgcctcggggttgaacaaggcgcctccaatgcggtttcacagtacaggaaatcacgctgttggaggtccttcttattaccatcaaccacagtttccttacaacaacaacaacatcaatgaagcccctatgcaccacagtctgatgcatccctcttatggagaccctcataggttcccgatacacggaagaggtcctcatccctacttctcgggacaatatgttggtaataataacaacggtcatgatctctttgacgcatacccgcagcaaaacgggcattttcatcactcatcttgctcttgttaccactgttatgataataaatactggcgaggttcagcaccggtggtccctgatgcaccctataatgctggtttttatcctcatgagagcgttatgggttttgctccaccgcataatcctagaacttatggttctcgtggtctacagcctcatggaagatggcctagtaacttcagtgatgctcaaatggatgctctttctcggattcgtcctcctaaagttgtattatcaggcggatctcgtcatatccgccctttggcaggtggtgcaccgtttataacctgtcaaaactgctttgagcttctacaattgccaaagaaaccagaggctggtacaaagaaacaacagaaagtgcggtgtggagcatgttcctgtttgatagatttatctgttgttaataacaaattcgttctctcgacaaacacagcttcaacgagacaaggagaagcccgtgtagctgctgattacacttctgatgactatgatcttcttggttatgtatttcactcgttggatgatgaaccaagagatcttccgggattgatttcagacaagtctcaagatatgcaacacgttcattctcattccgccagcctttccgagggagagctaagctcagacagtctaaccgctaagccactagctgaagctcacgaaaactttgttgattactcttcgatcaatcatgaccggtctggagcaggcagccgtagctctcgttcagaacacgacaaggtcacactgagcaaggcaacagccatgagacagaactccatgaaagaggtttcacttgcaagtgagatggaagttaacttcaacgactactctcatcgtaacagtggagtatctaaagatcagcagcaaagagctaagaagagcggattcgcgagcattgtgaagaaaagcttcaaagatctgacaaaatctattcagaatgatgaagggaacaaaagcaatgtttcgataaatggacatcctttaaccgaacgtctgctgagaaaagcagagaagcaagccggagtcattcagccaggaaactactggtaagtaactttcgatgcctcttctgttatgacatcttcttcatgactgctaatgtgttttggggacattctaggtatgattacagagctggattctggggagtaatgggaggtccaggtcttggaatattaccggtaaacacatttttgatattgcttcttgtcaatatgttcctgaatcttactaaaaaggcggaatcctttttgttgcagccattcatagaagagcttaattacccaatgccagagaactgctcaggtggaacaacgggagtgtttgtgaacggaagagagcttcaccggaaagatttggacttgcttgcgggtagaggacttcctccggacagagatagatcctacattgttgacataacgggtagagtcatagatgaagacaccggtgaagagctcgattgcctcgggaaactagccccaacgtaaacctttttacatcacaacttttgttactttcttcacaagaaatttatgtgtgatccagttggtttgtttgttgatggtgcaggattgagaaattgaagcgtgggtttgggatgagacttccaaagagaactacgtgaaagaagataagaggagagatatgtatttagctgaatatcttttgtttagaaagagagagcttatgtatgtatttagaaattggtattatttgcttccaagtttaatttttagacttcttcaatcaaaatttgctacaacgaacaattgaaatgaatttgtcatacgtctcaatagaaaacaaacaaaaaaattgagatgaaagattcttaaaccaattctcaagaaacaattcatgatggacattatgatgacattggctcctttaaatggaacagaaatagcagtgattgatgatctaacagacgttgacatcaggctagtctttgtgcggagatagaagcggcctggttatgagaatgttggagccatcaattgctttggttatcatgccatttgtcctcaaatcttgattctgcccactacatgatctacaactccatggctttgaagtagcaatagaatctgctatcggatccaaatgatctcattatccaaaccacaacagtgtcttctttgatggttagtataagtcttgcatcttatttagagtgtttgtgtttggttcgattgatctttgtaactgtgtttatgtaatcactcaagtatgctgtctgggtagtcggaagacagagtattatttattccctccttcagctgcaaaaattctctattttaagattaattagcccaatgtgagtaagcacacgttagctagctgagagagtgtggctttaattagcatatggtttagtgttaacatggctaatctatgcaaaattttatcttctccgtccacaagtttggatcgacttttaaacattggatcgacgtttagttaagtgatgggctttctttttagattttgaatgttttccagatataagtccattagtaagaagcccatgaactagaatgaaacggagggttcttgtggcaacaagtggcaagtctctttggcagaacattaataaggaaacaaacaaatgataaaaacgatttcacaaattttgaaaaccggcggaaactaaaaggcggctgccaccacctgggggacgatatgtggaggttactgacgctctttgcttcatgcaaccgaacatttggctcgtcgtgatcgttttacttctcatctttgcaaattactcttttacccgtgttctcctccgtggtcaaatagatattttcatctctcacgcacgcttcccatgtattatgacgtaaatacccttagactctctacgtttgatattattattacacaacacactggcattgtcgtatgggaaaaattcgttacgttatttatttcgacactccagcgcaaatcgattttgttagatttatgaggtttgactaaaattgtgaagaggcctagcaaacttgtggatacaagaacgacaaatttattttttcataacgacatttaccaaaaaagaaatcgataattaagcaaaagaagggcctaactactctccaaccaccaccactacgcgcggttttgccgatctttgagtctgtgaccacaacgagggcatttacgtccttacttagcttctctttctctccatccacgtgacttgattctctctctctctcttctttcatttcacgtatatattaatctggctccatctacatctgtgaaagagagagagagattcatgaatctttttacagaaacacgaacaagtttcagaatctggtctgactctttgtaaccttctcgtttaagattcattgtacgtattcaaatctacatttctttgccattgttggaatctccgcctcgatcgtttcttatcaaaggatctggtattcgatttttgctatcgtttcaaagcatggtctaatgatgatcctgatctccgactgatccaataacggttaagcaacgctgtttttgatcctccattgttgtttgccatcgatcaacactcagaaataaggtaattaacgcatctcgagactcattgttttaacaatctttgttttgtttcttccaaattattctcgtgaatatccgtaatctctccgtcttttaatgaacaacacatatcatatgcttttgtttgttttgttttgttttttcaacatttcaataattttgtctttttttcttcgatttaatttgtttatttcctgctataataaacgaaaactataattccatgtaatgttcgttgttgttcatagtgatttatcataacgagcaacaacataaaaatcaagagaataagaaattagagttatgctgcttatttgaattagacaaaacctacttttacttgttaaggaaatgaaaagatgttaataaagatgagcacatcgtacgtggcgcacgtggaagcacttctgtacgacggacccagtccaactcgaaccccacacacatagcaaaggttgttaagttggctcgtaggtgaatttaatacctgttatttcctttatagctggctaattacctaaattcgatccataataacacattcctactatgccaacatttaaccctagtcaaactaattaaaacgtttcttactttttggcctattaaaacgtttcattatgttccgcaaatagtatgaaatatataaagattttctaacaaaaaattactaagaacagttagactgattgagattgtttttatttccttttatttaattttcttttattatactctgtttatttgtgtttaataattaggattctatttgtcttgtcttgtttgctatagttggagttttgttcataaagaatggcgtttaatacggctatggcgtctacatctccagcggcggcaaatgacgttttaagagaacatattggcctccgtagatcgttgtccggtcaagatctcgtcttaaaaggcggtggtatacggagatcgagttccgacaatcacttgtgttgtcgctccggtaataataataatcgcattcttgctgtgtctgttcgtccggggatgaaaacgagtcgatctgtgggagtgttctcgtttcagatatcgagttctataatcccaagtccgataaaaacgttgctatttgaaacggacacgtctcaagacgagcaagagagcgatgagattgagattgagacagagccaaatctagatggagccaagaaggcaaattgggtcgagaggctgcttgagataaggagacagtggaagagagagcaaaaaacagagagtggaaacagtgacgttgcagaggaaagtgttgacgttacgtgtggttgtgaagaagaagaaggttgcattgcgaattacggatctgtaaatggtgattggggacgagaatcgttctctagattgcttgtgaaggtttcttggtctgaggctaaaaagctttctcagttagcttatttgtgtaacttggcttacacgatacctgagatcaagggtgaggatttgagaagaaactatgggttaaagtttgtgacatcttcattggaaaagaaagctaaagcagcgatacttagagagaaactagagcaagatccaacacatgtccctgttattacatccccggatttagaatccgagaagcagtctcaacgatcagcttcatcttctgcttctgcttacaagattgctgcttcagctgcgtcttacattcactcttgcaaagagtatgatctttcagaaccaatttataaatcagctgctgctgctcaggctgcagcgtctaccatgaccgcggtggttgctgcgggtgaggaggagaagctagaagcggcaagggagttacagtcgctacaatcatctccttgtgagtggtttgtttgtgatgatccaaacacatacactaggtgctttgtgattcaggtaatatgtgttcaaagttactactttcaagcaaatcctctgtttcctcacatcatgatccttgaatctgctagctaattagtgttatgtcgttgcagggatctgattctttagcttcttggaaagcaaaccttttcttcgagccaactaagtttgaggtaaagatcttgatcttggctagggatgtacatttggtttttgattcggttatttaactcggtttatccaatcgcttaggttacattacaattattttggtttgtgtttatcctagagaccttaagatattgatatgaatgtcgcaggacacagatgtattagtccacagaggaatctacgaggcagcaaaaggaatatacgaacagttcttaccagaaataacagagcatttgtctagacatggagatagagctaagtttcagttcacgggtcattctcttggaggcagtctctcattaatagtgaatttgatgcttatctctagaggactcgttagctctgaagctatgaaatccgttgtcacgttcggttcaccgtttgtgttttgtggtggtgagaagattctagcggagcttggtcttgacgagagtcatgttcactgtgtgatgatgcatagagatatcgtcccacgagccttttcgtgtaattatcctgaccatgttgctctcgttctcaagcgtttgaatggctccttccgtacacatccttgtctcaacaaaaatgtaagtcttactataatttcctttttggcttaacgttttgaacatcttaaattaaaaatacggatgttgaagttttttggttgtgtttttgcgttttgacagaaactgttgtattcaccgatggggaaagtatatattctacagccgagtgagagcgtctcgccgacgcacccatggcttccaccgggaaacgctctgtacattttagaaaatagcaacgaaggttactctcctacggcgttacgagcatttttaaaccgccctcacccgctcgaaacgctgagtcaacgcgcagcttatggctcggaaggttcagtcttgagggaccacgactccaagaactacgttaaggccgtgaacggagttctcaggcagcacacgaagctcatagttaggaaagccaggatacaaaggaggagtgtttggcccgtgctgacatcagcaggacgtggattaaacgagagcctgacgacggccgaggagatcatgacacgtgtctaatgaaggaaaatgtacggttgtatataagtggaatcacttctgattatgcgtttatttacatttcttgtgggtgagccgaaacaagcgaataaaatattgtaaagaataaattattctaaacttctaaaatattgtaagcaaattatggttggtggagattggaaaatttggttttctccaactccatggatcactcactcccattcgatgcacaccgttttacaaaaatgggcatatattagcaagaaataattaggcccaataataggcttatgcaatttgaaatcttcttttcgatagtaaggcccactaattaaaccaggcgtatttattaaaaaagaaagaaaagaaccatcctttaattttgttttttttaaaaaaagggttttctttttagttttatcaatgtctcatatatattcattaatccataaatacaacattcgtataggagatttggtttgaagaggcgattctcatatatatacgtacacatcaaaattaaatcaacgaatgacttcaatgtcgtttatggaatggtttcattttgggccatgagaaattagtaaggcacgtggaaaatttgcgtactcaaaatagaaaacacgtacattttatcattttaattggttttattattgataaaaacagaatatatcattattgcgttgtttgtgtgtgtgactttacaattattttgtaaggcatagttttaattaaatgtcaataagctatttaaattatgatacaatgacgaaaacgcccatggagaagctgagattcaccgggattgcctatcctcgtcaccaaacactcccactttttcctcttcctcccagaaagaaagaacgaaagaaaaagaataatatcatcaacaacagaagaagaagatattaaaaaaaaaaaaaaaaacctaatcaaaatatatagatgttcatttttggtcatgtcttcttcatcatcttcttccgcacgatttcagtccgccagtggtaaccttgatcaatctcgcatttgcctctcgattcgtcgatactgctagattttctctcgatttatcctctagggttcttattgatttccgccacccactctctgtttttagaatctaactcccgtctccttcgtttcctcctcctagggtttccttcttcttcaattcgatttccccttctccgatttcgatttgattctttacaaatttgtctgtttggggttattggattagccagatagatccaaggttctttaggctcgtagctatttgatttgttttccccatttccggtgactttgaagctacgattcatcagggaggttgcttattagcaaccgttgaagaaaacgtaacggttggtttaaggtctttgtttggattagaggggtaagctttcgtcggtgactgtcacggcagagatttgcatgggtgagcatgaatcatgggcggcttctccgccgtcaccctctggcttacatcccaacggtttattaccaggcaaggctgcatctgtgactaggccactcgatgctgagcgatgggccaaggcggaggatcgaactgccaagctcattgcttgcatccagccaaatccaccttccgaagatcgccgtaatgctgttgccagttacgtcaggaggcttatcatggaatgcttccctcaggttcaggtgggttaactttcttgtttttaaacttttgtttttattccttgagataatgtaacaagtaactattttgtgtcttctagatctttatgtttggatctgtacctctcaagacttatttgcctgatggagatatcgacttaacggcttttagcgctaaccaaaatctgaaggattcttgggctaatttggttcgtgatatgcttgaaaaggaagagaagaatgagaatgctgaattccatgtcaaagaagtccagtatatacaagcagaagtatgcgaattagaatgcttcttttttctcctctttctatgtttgctgtatgaaccattgatatttattccaagtaaggttgagtctcttgacgtactggatcgtctaatgatttttcactggtacaatgtttcaggtgaagataattaagtgtctggtagagaatattgtggtagatatatctttcaaccagattggagggctgtgtacattatgcttccttgaggaggttagcattccaccgaagacaacatgcctcttgctttctcttcctgagttaggcagatcttttgatttcttacctctttactgttcatatatgcaggttgatcactatataaaccagaaccatttattcaagcgtagtattatattgattaaagcctggtgttactacgagagccgtatattgggagctcaccatgggcttatttcgacatatgccctggaaaccttggttctttacatattttatcttttcaacaactcattttcgggacctcttgaggtaatgtcattatgaaactgcctttgttctgtcaagattgcttcttcaatcttcctgactggtcttcttgcatttgtaggttctctatcgttttcttgagttctttagtaagtttgactggcagaatttttgtcttagcctctggggccctgttccagttagttcactaccagatgtaacaggtatttacgaactgatgtccatcatacttttgcattagttgtgcttcttaactgtctctagtactgattgtcttgctatgcaattttttggcagcggagcctccacgaagggatgttggagagttacgagttagtgaagcgttttatagagcttgtagtagagtttatgcagttaatattgctcctcaagagatacagggccagccttttgtgtccaaacatttcaatgttatagaccctttgcgtgaaaacaacaaccttggacgcagtgtcagtaaaggtacttacttgggttgaatgctgtttactattctttataaaccaatacttttattattgaatgttaatctgtttgcattctgccttagttgcttatacagtatgaagctagaagatgcacaaacatgttgacttccttacatgcttggattatgtttttgttgttcaattattgtgtcaggtaacttctttaggatacgaagcgcatttaccctgggtgccaagaagttgaccaggttacttgaatgccctaaggagaatttgatccatgaggttaaccaattttttatgaacacatgggaaagacacggcagtggtcgacgtcctgatgctcctggaaatgacttatggctatcaagactgggagatcctgagccatatcatcaagctgaaaatgttagtaattctttaaacaacaaaagaaaccaaaatgccatccgtcttggtggggttcacggagctcggagtatgccctctcaacagaataactgtggaacagaaattacatctagagtaacatatcaaacgcaaaagagtcgaggcaactcttaccaacctgctcaggaagtcaattccaatcaaagtgctttaaatgataagcttcagcaaactgttaagccagaaactctggttaacaattttcatggtaggcatatttttgccaggacccgctctagccctgagcttactgagacacatggtgaagctcttttacaatctcgtcgtagtagagccgccccagatgctgggaaacgccaaactaattctaccagggttgatagtatcaggaaaaaaagtcttgagtctgaaactttgtcaagtggtgttagatattcagccgactcttcgtcagttaggcatactccatcccctcaaagtcctgatagtactgctgacatgagcagtgcagtgaacagttactatgatgaagtagggtccgtttccgtgaatgaagacttctctgttgcaggggaacaggaagagcaagatcttgttaactcgatgacatctgttactgggcaaggttttaatggacactttcctttcccttttaatttttcaacgggtcacttaccgtttccaattacaccttctatcttagcttcaatgggatatggtcagaggaatatgcctggtattgttccttctaaccttcctttcatcgaggcaccttggagtactaatctgcaatttccgcaaaactttgtttcttcaccatttacccattattttcccagtggagcccacccaatttcagaaaagccgagcaaaactggtagtgatgacatggggtcttcagaagtgaatgtcgatgagtctgacaatgatctctggcacgagccagaaaggggaactcatagttttggacttgaaaatggtggttatggaatgcatcaggcagatgataaacatcagtcatcttttgcagagcacagttttgtaccttcaagaaggaaaaatcggctgacaaggggggatgatttagaaaattcccactctccagtcagaggaagcagtcagattcagagtgaggagagaactgtaggctctagatctgtgtctggcgctagttccgttcgaagcaggacttcatctgaaagctcctgggatggatcaactacaagggggtcaaagccagctaaggatagacggaataggaaagttgtgtctggggccgcatctacactgtatggaaaaggaaagagtgttcctgagcactcaatccagattgatgatgataacagagaatggattcctgtatctagcaatgaaataatagatagagatctggggcctcgtcctactgtcccttcatttcaagttcagaggcatcaaatacatggtcatgaactagctcaggcaagtggatcagagtccacagtgtctcttgctccgtttatccttggccatggcatgcaacaaaacgaggttgataattctggatatacgttttatcccacaggaccacctgttccgattgttgcaatgcttccaatgtacaattaccaagctggtggtaatgcaacatcagatgctctggcaagccaccacagtgtggatgaaggagtagagaatcatgaaccctgtaaaagtttcgactcgtccaggggacttgatcagtctgagatagtagtttcttcgcactccactagaatgggctcttctgcagaacaggtggagcgtaagaatgatatactcaatggtgattttataagccattggcaaaatttgcagtatggccgctcttgccagaattctcaacatccgcctgtgttgtatcctgctcctgttgtagtgccacctgcttatctccaggggcgtttaccatgggatggtcctggaagacctctggcttacaccaatgctgtgaatcaactcatgacctacggacctcgtcttgtaccggttgctcctgtacaacctgtttcaaccaggccacccaacatttaccctcgttacgctaatgaaactcccagatatcgaagtggaacagggacctattttccaaatccagtaagaacttaataccttccttgagcttcctttatacttgcgtgcatgctttggttaatcgaggtacaactttcattttattgtctggtcttgtgaaacgaaccatagatattttcaaatgctaaatgaagtgcttttaccttgcttattaataataaaatggtctgtcagtcttgcagccctatatttctttaatgaatttacagcatgatctgtctgcttaccgtacttgcatccaaatctgcaacttgacaaatttggtcatgttgcaggctatatggttctggattttttccgttatacctttttttctttaccttttcgttttttcgttttttgttttccgttatacctttattgattctgtcctgtctttactcatgacggttttggtttgccacactgctctaaacttgtgctgaatttgttgcagaagatttctcctagggagcagcggcctacttctggcatgaggcgtggaaattatgggcatgacagaaccgaccatcatagcgatagagaagggaattggaatgctggttcaaagacacgaggttctggacgtaaccacaacaatcgtaaccaagctgacaataagccaatttcaaggcaagaccgatctgataggcattgggggtcgtcgtacagacatgaatcgtcctcctattctgctcatcattctcaaaacggtccaattcgctcaaacacttcacaagatgcttctggaaatattgcttatggtatgtaccgattaccaccggggatgaagcaaaacagtgtgacttcttcagagggacacaacgttccatctgtcatgatgttttatccatatggccataataatgtttacaattcaccatctgaacacaatgagtatgggtctcttggaccaggtggtgaagcgccacatttaaatgacgaggatcagccaaggtttcgtggtgctgctgcttctgctcatatgtcttcacctgacgatccttcctcgcctcacttccccaggtaattttggttttatagacttcctattacagcccaatgttaaattacagagaggaagaagattcttgattaaaaaagtatcgtagacctcagagtttcctcttgatttcactaaacaggggaaagtaacatcgatggttgctcaagtttagctgcaataaactcaagaacttagaagaatactgtacgatcacatcactagggtcttggaaatctaaagaaggcaaaaagttgtgaagccgtgaaaggagagacttgatagagctcagaccaatctggatatttctgttcaagtgtggtctggagagcagcaaagaaggaagccaagtcaaaggggaatcggtaagcgacccaagcctggattgttctttgtatgtacactacaatcaagccattaccgcccatgatcatcggtttaatcatcattttcacggagattgctgtttggttttgatagcccagatggatgaaaaaacgcaggaactctttctcagatctagttcggttaggtaacttttctctgttttttgtttcttttcgctttcccttagcattttatttccatagaaaatgtagccttttttgcccacatagaaactaatagaatccagggcttatcgtcaatcttgtttctaaaaattcaagaaagaatttctctactatttttagaaaaagaaaactgtagtacactttttagctgtacctgtagcttaattttggaaaattacggttatgaccagaagaagatgttgaatcatataacttcgtaagtctaaaaaaagtcaagtgtaaaaaaaaagaaaagggaaccataaattcatataagataaccgtttgtaggtattaaactatgaatgatgacgcttattcaggccaggcctaaatagtgtggcttatgttttgggccattaatgggctcgaaagtagtatgaaaatataagtaaaacagtatagcccatcattctttttgtgtagccatgacctgtgactgtgataaattgtacggagaaaatgccaaaactaacaataatttcatgtctcttaaacgtctgagttaatcaaaacgagctcatagttattgttttgttttagagtaataaacttagacgtaaaagagaaataaatgcattgttttggacctaataatagttgaccaaacattatagaatataataatttgagattcatatcatgatggatcttaggctttttctttgaaatatgatgagttgttttgtcacattgcaaattacatggttcttatgttgtttgataaactcggcgagtatggtattataaaagagaaaaataatcaggggaaaaagcaagcaagtcaacattgcgcggaactatatataatcagaagatcttgtttggtgcctattattgcctaatgacacaaaactattttgtagtgttttttttttttttataaagtgtaggaagtcggaccactcgtttatgagaaatcgaatttggtatcaattaatatagagagtaatttcacaaaaaaaaaaatggtggtcctgaagcaatggttgaatattacgtagaaaatggtattcccagaaagttccatagagcgagcaggccatgcccataccctgcctgcgtcttgtctcgtaacgcaacaatcaacaacttgatgaccattacggttatatggtttaattcgatttctttctcttggttcgctttgattttggttgggccaacggttaaatttaaatccaaggttacgtaatttaccattttactgcaaatattgtcttttacatatttactacagatgggatttttatttaataaaaaagggaaatataaaatagaaaagcgttttctttttttctttctttctacagtctactctcctgtttggtctctctctctctctcttttttttttactcttatctctgtgcaagcaacttcgtctctctcgataatggcgttccgatatcttctcgctgtctccgtcttcggagtttttgtttgaattcttcaaaggacagtcggatctttgttttacactatcttcataatctttgttggatttcatcagacttgtcatttattaatccatcgcgtttctcagtgtttctagttcgccaatttcggtttttatattggctattaacaattcgtcgacataactttgtgtgttttcgagtgtgtgagatttttagggttcgttcttcaaaggcttcagggtcgcgggaaggtgagattcgattggatcttttttgttgttgtttagtttgttcctctcctcattgtatatatatatatatatatatatatatatctaaacttttctgcttttttgattttattacaatattatttttcaaagtttctgttcatgtgggttttttttgttctttgttcttcttctgtttttatttttttaagaattatattactctctcttttattcatcaatctccggcaatttccctcaatctggagttgatgaactcactcaaactctgttccacgttctttacaatcaatgatttcaaattctgaaaatcaaagcttgttttgttgtttcataaatggcaaaaagattctggaattaggtttcacacatactgcagtttgttctttatctgggatttttgtttaggttttggttttgtgtttaacttttttcttatgaaatagtttttttttaattagatagattctgtagagtgcttacttgggatctgaaaccttattaaacaatgtttgagagactcacttttcatgattttttgattaattaaactaatcactgtggaaaatgctttcactttatactactactattctcttctttttagcttcctaatatattttattgctttgattgtttgttgacttgtgctactactagtactgtagaaaaactaactatggccatcggctaactggttttcttttgttattcaggtttatgtttgcttgaaaattttgatacaaattgaccaatatgttgaactctatggactgcattgttgtttttggtgctaaagagaacacttctgattgaaggatgttttcactttacattcagcagtaatgaagaacggacaggttcttctctttttttttttggatcaaattagaccggacaggttcttctataacacaattattctacctttgttgtatttgctttagtcttcttcaaaagttgtgtaacttctgatatgcctttcctttttgcaagataacaactagtttctggtcccttgtagctataaagattggtggattaggttaacactttcacataagaagttggacaatgttgatcgtaagctaacaagtagtttctggtcccttatagctataaagattggtggattaggttaacactttcacataagaagttggacaatgtttaaatttccttactagcaataattaagctgtgtcagtacttgtagattttgattacaaaaaagtgaaactttagaaaataactattatttgatggcagtgcgcacaggagctacaatcttccactcaagcttcacatgactctcaaggtgaccagaaaaccaacctatcaatagatgctcctatacaagattctggttctgtatctgcttcaagcaatgacagtaggaaagtttcacgacaagatattgaacttgtaagaaacaaatttgagctccttcttgtcatttttaactattaaaaagtaggtttcatcgctctctccctatctaagtgtaaatatgttgtgtcctccctcgtatatgtgtaacatgtgatgataaacacttttgaatgatgtaggttcaaaatttgatagaaagatgtcttcagttgtacatgaacagagatgaggtcgtgaagactctcttgactcgtgcaaggatagaccctggatttacaaccttgggtaagcttttgaaggttattaaattctctttgcttcattttgtttcattgcatcatagcctttctttcagtcttagattttaagaattctcattagcataactccatcttctgtactgacgtgggatagaagagctacataggatactgggttgttgaagagtgacacaaaatgcatgttatatattgtttagttatagcattagcaacgtgaaacatgaaatgaaatctctatttctgactctcctttttattttatgtgtgaaatcagtttggcagaaattggaagaagaaaacgcagactttttcagggcatattatataaggctgaaactgaagaagcaaataattttgttcaatcatttgcttgagcaccagtaccatctcatgaagtatcctcctggacctccaaaagttcctctggcaccgatacaaaacggaatgcatcccatggcacctggtaataagtctgaaaccctatatcacctaaaaacttgtatacttatcacaagtaaaataagtttgatattgaacttcacttttatttaacactgttgtttcgcagtgcagttaacatgccgatgggatacccagtactacaacatcctcaaatgcatgttccaggccatccccatcatcttgatgcaatgggagtatcgagctgccatgttgttaatggagtccctgcccctgctaatttccatcctttgagaatgaatacagcgaatgagtaagaactaactcgcagtagaatgattattatcatcagttgatggcatgtcctgagaaaaatctccatttttcttagtatggtgatcgatacaactgcgaacgatgcaactcctcaagtgattccaccaaacagtggtgcgatgcctgagatggtagcgagtccagcttctgtggcgtcaagtggacactttccatttgctgcttcagacatgtcgggtatggtaatggacacttcagtacttgattcggcattcacatctgacgttggaccggatggagaaggagccgggaattccagagattccctcaggtcatttgatcagatcccttggaactttagcctttctgatctcaccgcagatttgtcaaatctgggaggtaagtttcaatgtcatccttctctttttatttctggctatggaattgtcagttttataaagagctgattatcagataaagatatgtatgttgcagatttaggagccttaggaaactatccaggctctccatttcttccatctgattcagagattttcctggattctcctgaacaagaggacataggtactctcttatttttcaactcttcttcttcctccggtttcactagtcttgaatcagattgaactagatttggtacaatgaataataaattgaaaacccaatttgaagctgaacataaacttcaagtttggttgatatagtgttatgctctctgatcattatttaaattgatgcacattatctctttatctgtatgaatagaggagtttttcgtggattcggtgcctggacctcgttctaattcagatgaagagaagccttgaattgaaaggtagagacggccataatcatctacagtcaccaagcattattaaaataacaagtattgatatataaatcagagtattatgaataaaatgaagctgcagttgtagtctccttgtatctctattacaattctcttaaatgaagcaagaaataggcgtagactagtttccttttcttttatttgtttcaatcctatgctttggtcatatgttatgttgtagttatctctaaatggatattttctttaaaaacttttttagaaatatgtcttacaaaacactgtaaatgtcgttgaactctttagcagcattctgcatcaaaccggatatgagacataatacgcttgagtgtacttataagaaatttgtctaaatgaggtgagagcgtaagtgtacttataagaaatttgtctaaatgaggtgagatttatgtttaacagatcaaaaattaatgatttatgtttagtctttcgcgttgtcgaatccggaaaagaagcacaaagcttgaaagtactaacgaaataaaaaggcctataatcacacaaatcagactgtacaaaaaaagggaaaaaaacttaaaagcatcaatgtttcttattattcgatgatgctatgacataaatgcttataaactattcacaaagtcgttgattcagtctatcacgagtttctaagtttttttacatgaaggcttactagagtcaggacctcgcttggcgtacaaggaaccagccgctgatatattagaaggcagagagaccgtcgcagagagaggttggaaattagtgtttccaacgaaccagtagagagcccatttgaggttgcagagagtatactttagtgctttggtccaactctcttgcttgttgaagctctgtgttattgaataccccaatactttgtccttttcgatcctgcaaaaaagattttatatgagaaacttgtaagtttttccattgcacccattaacaaaaaaagataagcgacgacaaagattttggtctaaaagaatggggacttgcttgtatggaaggttgaggcaattatctggtggaatattgttctcttggtcctttgaatttgcaaaatcagcaaagtctttaagacacatcaaatacagtgtcatggctttatcgtaccgagtgctccaaaacaagttaacaggaccaaacctgccgaagattatcaacagcttttagttaaaaagggtcaagaaaaacaaagacaaaactcagcacaggacatctgttttcagttcaaccccaataacaaaccaggacaagaatatgcaatttacttacagctcataagtttcgttgttgctgtctacaattctaggataactccccatcggctgtattttaacttgacatcttaaaaggggttactggtcaaggataaacttcatatacagtcaacagaatcaaacaaaaagggtaaaataaggaaaaggactgtgagatagttataaggatactgaaactttggccggaaatagttacacatcgtatggaggagaagacaggcttggccccaagcagcattgatctcatcccactcaacctaaatatgtttcatgttgtttagacaaaaatatgagcagaacgagattataaacatacaaggaaagtagcaaaacttacttttatggcagggagtcttccaagtcgaaaattgttaattgtaccaaattccccatcattccgtatggggaaggcatcaataagtacatttgtcttatttaataactctaaatgtgcttgtgaaacttcaatctttgccaagattgcatctctctcttcctgttaacaaagacatatcttttacactagatctaagaaacgagtgttacactgataaagcctaaacctaatcaagtgctatggctactaataccacaataagagagaactattatcaagtgctatgaatactaataccacaatgagagagaactattatcacgaatctgtgaagcaaacgaatgaaggctctggactctctaaagtatcatttagtaaaatgaaaaataagggagaaccctaagagtatcaccagaaacgcacctgatgggcaattaattgaaactgaaaattattgaactcttgccaatacctataccagaaaagtcgaaaaaacatgtcagaaaataaaaccaggcattataaatgtatcgttggccaataaggaaacagtgagagagcttaccgatcttcaagttcgttaaaacgatttcccttgaattctagctccttcagttgatggtttacttcagcattttgtttctctgtttcttctatagctgcaacaagttttctttcttcttcctcaatctaagtagagcaggaaacaacaaccaacttctaacttaagattatatgaaattcatcatctttagagtcaaacaatatggtaaaagctgaaatataccttcttcttttccttgagaaaatcagcttcactaagaacatcttgcgtctctccttctaacctctgaacgcatgcttcgtatgcttccacgtccctcgtcacatcctcgacttctttttcaagtttatcagacaataccctcatgcattctaagcacaatggctgttcaacctataaaattcaaaaaaggggaaagtaaaacatattatcaggtccacatgactcaaatttatcgagcagatatactcttgtaacaagaacaaaaacgttagagcgtcatgatacctgtgtctgagttctagcaatatcaaaagcacgagttaagacattgatagtcgcattaaagccagaagtatttgaatgtaagggaccgttttggcccacttcaagagacagattgtgagaaccaccagaatcagaaacaggctcagacttatagacaactacaaacgattcctccatcgcctttccagattgagtagcatcaggctgaggtgaggacgccccgcgaggacgtggaggaatgccctgagattgaggaggcttatgtcgaggtaaaacaacaaaagagttgtccatgcgtgttgaaccaagaacactgttagctccatggatagatgagccctgcgtagctggatgcaacaaatcacattttcattatgaacttttagacacataacaaatcattcatcatagtaataacttaaaatatgctcgaagaagaaccaatcctaattctccaaggcctaacttacagattggatctaaatcaacaattgaactctatctatctatgatgaacaagaacgcaattaccaaacatgaattccaaaaaagggaacgagagggaggaagaaggggctaaccggacggagggggatcgttgaagaacttgccggcgtaggaatcgacgccgacgatggtaagggagtggtgacagttttggcagacccatttcggcagattcggatcgatcgggatagtccgacttttatctggaatctcctctttcctcatcgctctcccagtttttgtgggggttttaaccaaagagaaactccgtacgcaatcaatctagggttagggtttgaatttgtctacaccaaacaatctgtgtgtgtgatgcttgttactaatctaaatcattcaccgcctaattttagatttctctcccagagatagaaatccgataaactgaagaagaaggaagaccttgatagatttgtagacaaaactcacacggaatttatagttttaaactaaaattatcatgtcttaatcaaaagcaccagtggtctagtggtagaatagtaccctgccacggtacagacccgggttcgattcccggctggtgcattgttatttttgccttccaaatatttttctatcgctcaaaacttcacaatgcacgtgaacttcgattacattaaaacataaacgagtttagtttgtaaactattcaagtttcattagattgacgataatttttgttgttgttatattacacacacaaaacattaagaaaagaaaaacaagtttgtatcctcgagacctcataaaaatcaagtttgtatatcctcagacctcataatttaattaaatcatcgttacgttttaaaaacaaatcactaaataatgggcttttaaacactaatgtatataagagatatgagccgtccaaaaaaacaaaaatcaacggtctagaaataatagctgcaaaacaaaacaaataaataaagaagaaaaaaacaaaaaccctagctagagaattgtctcagaacatgaggtcttcgttgctcggcaatcttcggaagaagttgaggctcccatcgggtaaattattgcggaaccacggtagttgcacccagtagcaaataaatacgaaaatcaaacacttacgaacatgtagatcccaaccaaggcaaacgacgagcatggagcaataacagagggccaataagataatcaaaacgaatggccgctcaagcaacgtaaaagccgctagtaaccgttcgccttgtgtagcagcatcccccattaataacatgacgttctccataatcttcctcaacctatcgtacctcatcctaagaatgttcaaatcgttctccgacgacggaaacgagtcaaactcttcggctaactcgtctaggttgatcgagtcaagtttccgtagcttcaaatcgacgagaatcaaaggaggcggagtgacgttccgataaaacaaccagttatatgtttgcctcggggacttgaggatttcccgtaaaagtataaccacaatgcaaagcacaatgcaatacgcaactagccacgaagtcaccaaccaatatatgtagtactcccaaaaaagaaacacaaaactgactccaagcgcaatgaatttcggagtacaggctgtcgtggatctgaccgatgcaatgaccgaaacacaccacaagaccatcttaacgactgtataaagcctatcaaaattatctttggatattcttatactgaagttcctactctttggtttcaacatatctgacacaacttcgcttctcaaagccggctctgttctcgcaagattcgcacaattaatctcaacagcttgtgctctcaacttgtcgatctgatacatggacaatggagatttgtaatgagctttcggtaacatccaacggaaaggagctgaataccgtgcatacccttgcgcaacataaacaaaacgaactgctagctgaagctctcccatcttcttcagtccgctgcttcccaacttcagaataggatacgagcaagtgtaaatccagtcactttgtacccggttcaatggaatcctcactttcccgatcggaacatcgttcgccttattcttgtcctccaagatttgtcgattatcgtagattccaagggttaacaccgtacacttctcgtaaacatcccacgaatactgctcgttccacttgggtgagacactattaaccacggttcgagtcctggcccatttattcccgtatttagccactacgtaactgtcgatagtctgttttttctcgtcgcttccctttaaaccggttgctcccaagatcccgatttctaatttcccgagcagaccgggccataacccttttacaaaagctctattgtcgctcgagtattgggtgcattcctcggcgacgtgataagcttgatcagtggctagtttcatcttgagtctgctagcgaacctcctcgaatcgccagccggtttgacttcagtcggcatttcaatgtcgtagaacaaagccggtgcggaacttggaactttgagcggagtcatctctgtcagcttcttcttcaacgtccctatgcatccttcgtgttgttcgtcttctctgtcgattaacctaatgtagacagttccttctaacggctctgatgcaacaaagattagatcttggttccatgacgggtttgtaccggaagaaactttcgtttttagagcgactttacctagagtagctgtcacataaaccgaaggagtcttgtttttatccttggaaatcaaatcatgacctgaaacaatcgtaaccctaacataacagagccttggggctaggtagaccttaggtcgcgtgttgatcacgcgagaggcacacacttcacaggcgtctgaaaaccaagcctctggataaacctcatcaacttgtgtaccgaaccaaactgacatcagcaactccatgtaaaagtcggtttcggtattatgcatagagtaccactgcggtgcgattcttgcatcgggaggaaccctagtcggaatttccgaggccagcttgaagttgcgcttgttgattacggtattggtcggaccgtctttaagagtaaccgacaagacatcacctttggatttgtcgaaagcaaagacttggttccaatccatatttggtcccattggcagatttttggtagaggatttgtagttcccgagagtgatttcgacgacggggcaacatatgcgggcactagggtttacaacagagttgttgatggcttggattacttgtacgtaaagaaactccatctgttcgacgaggtcgtgtgaagaagttggaccgtaacgagggtttcgagctcctctttctcctcccagctttggaaagatttgcttgacggagaattcatctttattggcagccatctctgaaacaaaaacaaaaaaagaaagatatgaataagaaactgaatttcagacataagtaaacacacgaattagtaataaagctttaaacgaactgacttagatagctaaacaagaaccctgaagcaaatacaaatctatggggaataagaattagactaccaaatttttgatcctttaacatatatcaacagttttcaagttccgagtgaataaattaggtattggatcttaggggaaattaaagatcgaacctttagtagagaaagaagcagagaagaatcgagatgaagcaaataaagcggtaaatatttgagagatgagtcaaaggaagtaactcacagacaatgtttgggacttgttttgcttccgtcttctccggtcagcttccttaggtttcttctaaagcaaggcttgattattctttttgatatatatatatatatatatatattatatatatatatatataactcatatagaatatacacaaagagttgaatagagaaacaagatttagagaataatctataggatatttacaaagagtcgaatgcttatatgtaatatcttctttcctaatagaaacaatgtaatctgctattatttgtaaactaaaattgttaacaactttaaaacgatgaaaatgtttatatgaaattaatttgcaatactttcccattttcgtggtttcatagaatctgccgaagaaaatctacgaattctctcattggcatttttacttttctcttggcgtttgggtttgggtttggttttgacatagtatttaatgcaattatagagagatccaaattccaaattctatacaaacgttacaagactattaaaaacaattaatcgcgcgccgacaaaccgggcagaactatgcaacttgagccacgcatcaatacattcggtatggaagcaatgttcacattcaggtaaacacctaacagtttctttggttgcgtattccgacaaacaaatgggacatacaacatcactggacccggtcgggagtctcctactctcccctagctcaactttcttgtatgactcaatcgtagactcatcgagacctgtcctcgcgacttcctcgcttggctgcggcattacggatccagagaggcgtgcaaccactgcgtgttgtatctgggaagagactctctaggactttacaatcagggcaatagtaattgttgtgctccagttccttaaaacgataaccaaattacaactgtcagtcattcggcagttgtcctaactacttagaatcaaaagttaagaagcacggagatgtataactgcaccttaaagcgctcattcgtaatgatgtcgcacccagcatgaacccatacgttacgcccatcacaacacacgtaatacatcaaatcacgtcagctacatattgtagatgtaatagtttataactcaggtcagtatttcaccgagcatggtcaaagagactcttgcagatgccacaatactgattggatttccacaactgaaacaaaaaaaattggattcaactctttttggccaaagaaaactgaagagtgaggaaattttggtaagaacctttgaacagtgtctgaaccatgcatagtagattaatgagcagaagttgagaaaaaaggatagtagaaataaatggatatgaggcccatattatttcaagcccaattgtgtgggcctcagattttgtttgaagctcattaatttaggcctaatgtggtaagcccacatttattctcaccaaattttgccaaacacatatatttcctgatattacctattctgattattttaacaccaattgccaaacacatttatagaatcctaaacttaccagaaaaaataattcaaataataaactagaattaatgtgaacaaaacttgtaatatataaactggcattgatgcatttaaatacaaaacaattaaaatggttatattgaaaccataattaaatgttcatacaaaacaaagatttgtaaatttagactaacaaaagttaggtgttgcaactgctttgacgaatgtcttttatagtgataaactaagtgttctaactaataatatgtgcttagactaaattttggctcaaattcaaatatttatatgagttgatggctcttttcatcgcccgtggtgaatactagaaaggactacttttcattttcaccgtaaaggtaaaagattcatacacccttggcatcatctgtaaactttgttattttggttttcttactctttgtgcagactccatggttagataacatgcattgtgtttggacaagtcattgaaggtatgaagcttgtgaggacacttgaatcccaggagaaaggttgcagaatctatgcctgcggagagctcccgatggaagcttaaaaaccaccattaaaaccggtgcattgtcattgatatccttgttctgttttcttattatgactattcttaatagagtttctctttaaacctgaaccatggttgcaaccatggcttgttgaacaattggcttttctcgtcttttttgtcttcccattattgaaccggaacatcaaaccagctcattttttttttttttgaataaaatgtcaaattatactcaaaagaaaaaatatactttttacatcagcttttttgatattttgataataagagaaacagagctagatcaaaaacagagtaaatagaattgagagagcaaaaacagagtcttctttcttagaggatgctatggacgcatggcaaaccagctcatttttcctacatctcattcattataaagcgcaagtcatcatcttgccaaacagcaaatagtctaatttcgttatagaatggtccaacactaaagcttcttaaatattcattgggtttgtgttgtgtatataagttcaatattcagtcagattattcttgcaacatattctggggacaaataaatgttactgaagaggaaaaggatttgaatactagaaatgcttaaagctttgtgtgactttgagacaatgcactgtgaaggaatcagagaagttgctgggagattctgatggaaacaatgtcaccgtctgttcctgctttcattgtgtggtacttcacaaggattcctgcaatttagatttgtaaaagaattgtaattgtgtttcttacttgctagataaagatggttgattatgcaaagtgatttggacatgtaccttcgttttcttgcagtcttgtgtgaacagcaacagcgtggggtgcgataactgctttaggttgggaatcatttgactctccggtccaagacttgaggttgagaatacctattattcatgtgaaaatgtatgagacccaaggagaatgatctaaagaggaggagtaaaggaacagaaaagtaatgtagatttgaagttacctgaatatgaagattctttaaggtgtttgaggtcaaatatggctccacaagctgcacttgcgtttttctgcaacttatgagatccgatcagattgtaatcccagcttccatctttgtagccttcactaaggaagagttcaatgtgcctagcatcaagagtttgcattgttcctatacatagtaaaacagaaactctcttagttgcaatttagttatttcatagactaacatcaatagaaacagactagaagttgattagtgtcttttaccatcacaggtactgaggtcacaaacagggcaacgtacaagctgtaaatctggaacatgagataagccatgttatagttttctttttctgcagtagataaagtttctaaagaaattgttcttacctgcaatccaaataccgcttttgatgtcgttgataagacatgaaccactggattgtaacatccgttctatggttccttcccttgggaatttcagacgaccactcaaactctcagtcaggagtgaagttcgagagtcaagaacaaaggcacctatccgcatccaatctataatgacagtgtcaaaacgagatcaaaatgaggctgtgatcagcaaatgaagtacttcaaagtcaaagatctgtacaacatcttaacatgactaagaagagagtatgatggatccaattcaaggactaaccaatatgcttctccttctgacggaacaagtaagagtgactcccatctgcagttttccatatcttttcttagtttaccattgtagaagaatgtatcataagtccgaaatggatgtgaaacttaccaaaagctgaagcataaatcttaatccaggtggaagaaacgggaaacggcacagggacctgaagatcacgcaagcaggcaaacctccaaacagtatcctccattgcgatcttatagaaccatttgtttgttgctcccagcttcaccagtgatttaccatccaaaaaccttgaaatgtatgtccatatatcttgctcatacctgattttgcagagaaaattataagatacgctgatatagagacttagatctaagaaacgtgatatagcgatgtgattttcaaaattcttcctcgtttgaatctggattcagtttttgacgattgaaagcggaataatatgaagaaaaactcaaatcccaggtttcagcaaccacacagtcacgatcagagatcgatataagcatctgaatctcatacaaatcaaattgattccagaaggtaccgaagatgattgatcgaactctatctcctagatccatccaatacagtaagattaaacgccgtacaaacatttcaaaatcaaattcgagctcaacccaaactcacacacacaaataatatctgagaatagatctatttcgttcataggggagaagaaaataccatgaaaagcgagactggtaagtctgagcagagcaccgtggagatacacagccacgaattcctctgaggatcttcccgttcttctggtcgctgctctgaacgattcttctcttagctctaccatcttcttctctctgaatatcgttcttctgttcgttgctctgcaccaattttctcttccgtccaccatttccttctcccaccggagctatcatcttccctctactatctccttcggcatcactagatctcgtcttcattctctctctctctatctctcttctcactcagtatctcactagtcgctaatttgttaagcggaaaattgtttcagaatttggtttttgctctgaaccgtgtagctgtgatatatagccgcgagggagacacagcgaatttgaaaatttcgaatgtcaaatgacgtatatacccctgtaacaaactttctacctctgtagattttaaaatttttaaaatacttttcaattttagttagaacccggtttagcaccaacagacgtagcattaaccgagagggtcccagtgagtgtggtttccatgattatgaaaaatcaagatagtatggattttttttaatagaaaattcagaaactgtattatggaaaatgttaaaagctatattaacacttcaacattttggaactttaggttgttggctgtgaagttattttcttagagtcggtgaattctagacatttacaaaattgctacgccggaaaagtatctagctgaatgtacatttaatgaatcaatcggaaagaagccagcatcatgtcaagggatttcccgtaagctagccgccgaggaaacaaatcggttagcttcccaccgccattactgttcaattagaaagcaagtttgaacgtttgcaagaatggtttagacttaagagagctctagttcatgaatttgcggcagtttggagctttacaaaggcagggcactttgatctcttcagattcatcaacctcaaagagataatcatacctgtagagaaataggttttcatgatcaaggttaataatgcatatggatttaatctatatcttatgaaaagagaagctgaagaaatgttttacgtaagctcttccccagctgcgacattggtttttgcaatgaggacgattctgttgtcttctccatcacccatactcactatacgagcatagcaattgggcatacactgcacaagacataaacatccttagtattaattaccaggttttgatctcgtgtgccaatttagggaacttactgaatgattgatcaatcgtgcgatgttcccagagtctgtggcatcaattactatctcttcgcttatcttgaatagctgcgttgttgttgttagacaataagttacttattagatgcagcggttaatgttttaatctaagcaagcaagcaatcggaacttacgtaacaatctttgccctgcgaacgatagtttgcctctctcagatctgcaacacttctcctaactttcaccccacgatactcgatgatctgcacaagaattttaataatcagtagttagtttgcctcaagaatttcaatttagccatatcaaaaccacgaataatacaacgtaaactaaataccatttctccttcttgaatacttttccttgcaaacaaaccccatccatgtatgccagatttaccaaagcagactcgaaaattttctgtcctctgaagaagataatatattgtttataaatattctaggataacaagatggagaaaatattaactcttcatgaatcaatgtttacctgcaaatgttttagccgttctctgaatgatgtaaaatctgcttcctggtgtgtaacaaggtaaatggaaattaagatcttcctaagatattcagaaaacgttgccccaagaaagcaaaacactgacatgaatggagctcggaatgagaaacttgccttaaaagagtttagattctcgattgcactcaaagaatgatggcttggtcccttaagcctgtgggatatagcctccagatcaatcttctgaaacgtcagcagtaaaagatatgaagtagtagctttgctagggaatagttaataacgaaagactctccaacgtccaagaataaacaagatccccagatgcatacctttgtgtttgatctactatagatacggcatcttgctgcagaaagagaatcaaatacacgactctgttcagcttgggtttgggtttggaaacctggaagcttcatcttcttggtcaaaacgagtcttgaacctttggcgcgcccatattgattctgaagcaaatttctagagccaaatactcctgagggtgtgtgcacaactacaacactatctggatctggctttctacatagtaatgatacaggcgatcagttggtcccagtatcacataacaggtcagttaaagaatatgtcggagaaacaaacctgtgaaatgaacagtaaactgacttcctggttctctgcacaccatttttttccaggcagtgcaactaaattccatagacaaaaacatcacttacacatccctaagatgattaactaacaggacagaacacctttgcaaggggtttaacgtgaaaaatgaagattatcataagcacagaggctaagcagtttaaggacttgactaacctccatgttgtaacctgcccgtgatgcacacattgcgtggaagtgagttgcacacttgcagcaatgaacgcaggaaccatgtgtctgcttacaaattgtgcaaacctaaaaggaattttcagaaaatatgaatgatgtataatataataaaacttctaatagaacatgttggttatactttccacttctagcattcatttataccttaagaaatgaatttgctggaattttgaaaagtccaacagcaggctccatattttcatgattcaaaaacccaacttccggtcggaaccaagcacatgttacatgaacccacaaaccctcaacgtcgcttggttttaaagcaccacctacataatggaagagttcaggaaagaactagaaatatggaaagtgagttcaatttagagcacatctacccaaaagcgaattctcagaatgactgtatggaaccttgtgacaggacagtcaagaataaaacatcactaatgcaagatcaggaaaaaaatcataaagagagctaattctgcagtagtaccttttacaggacaaagacaacaatctctctcaatgtctggtgtttcacatgctctgcatacccaggaagtgaggtcctgagatttgcttaccccataacattcttggtgcacagccacttgacacctgcttacagatttggtcagatttatgactcatgtttagttataagaacgctgtagaattcagtataaccaaattatgccattaaagtaacctgttacagatgatcattttattttcttcccagtcttctacccatctgcatacagcacacctttcagtcgtccacttagccctgactggctcatacttttctgtgcatataaaataagtagtaagcaagtatcttagcaattttaaactccaaaagaaggacgccaagaattaagatatactctaccttctagcaaagagagcatcttttgcttatccaacatctgggtttctagagtataggtactgaattctgcaatctgtaatatcttgttgtcagtattatacttcttatagacatcatgcatgtaaatttcaggggtatataagggaaagtttatgagagagttaagcataagggatgtacccatttttctagaggtagcattgtgtctttcactcttacactatacttccactttttggctctgcagcctgtatgccgttcccattcacttggtgactgcttccttgacccacatgaaccacacttgcactcaattctgaaaacaatagttccaagataaatgtgttgttttaatctctggaacaacaagagaatggtaacagaagcctaggatcaagcgcagaattgtcgtcttcagagaaaaaatcatcttacggcattgcattgtacagtcatggacaaacaaaatcctgctcaaatgaggaaattgaaataaagatgatgcatctaatacttacgcatgaaattttctgatatatgtcccttccatgccattacagactacagtaatcgcatcaggcagcccagtctctgttgtcttttctgtagacctgtcccaaagaggttgtgaagaggaattttgcaaattaaagaattagcaatagaacaatgcaaataataaaagcaggagaagatatttttttcgagaagactaaagtgagagaacatgagatgttaacaacatacttaaacactgagttctgttcttctaatattgttggcgtaagctcgtgttggactttacaatcagggcaatagtaattgttgtgctccagttccttaagatgaaaccaaattagaacagtcattcgacaatagtcttcaatacttaaaatcaaaagataagatgcacggcgatgtataacggcaccttaaagcgttcattcgtaatgttgtcgcattcagcatgtacccatacgtcacacccatcacaacaaacctaatacatcaaatcaagtcagctatatagatattataatttcttactcaggtcagtatttcaccaaacatggtcacagatattctcacccaatctccatcatctgaagggtgccatattctcttgcagatgccacaatactgattggatttccgcaactgaaacaaaaatttggattcaattcccgtcgatcaaagaaaactgaagagggaggaagttttgataagaacctttgagcagtgtttgcataaaagctcttccggttgtgagtctttagtcctttttagagattttaatggcattactgagccacaaccgtcgcatgtccttatgtcctcatgatatgaaccctacacaataattaaatcagcaaatcgtttaggggaaggtatttccagtaactataaaagagtcagatacaaacagtacatctacgcctatgtagtatgtttaaacttcatgacttagaacagaaagtatatcaccagacgtagacactacaagatgcttatagaactgtccagaattgatttacttttgtcttcccaaaacaattagaagagcaaacttgaacatctaaccaaaaaaaagaaaaggaatatgtgtcaagaaaacgtgcctgaaatctagaagcaggtccatagtcctggtcggattccgtcgcagaggaatctggggagatgatttcagcatctccaaaattaccattttctgctaaaactgcttcctctagtgccttgttaaattcacttgccttgtaattgaacaagtttgtctgatcctgaaatctgaagagatgaaagactagtaaggaacaagaaacaaacacacaagtatgaaagatttccagaaagagcgtctcatgtacttacttgtccataaattccgtaaatggatacaccatcccttgtcttacccatgcatagtcctgttaatgaccacaagttttcagaaaaaaagatagtaaaaataaacgccagcttgaagacagattaggattaaagagattaccctctgagttccatccttggagtacccaaaaaacatgacacaaattgcgccagggacgcaatgtttcaagaccccatcaggcgcttgtgatatcggatcgatcaccacagccggccatgctgggaatcttttcccacacttggcccacacaagatcgccaaccgtaaattcctctggtttgtacacgcccttacgcgaggcgtcggactttttcggcataccaaagttagcatcgtcgtaggaaatttgaacatcccagtaatcgcaatctacttcactgctgtctccgttatccttacgtggaaacaccttcgagtctttgctgcgatgcaatttcgagcttccactgaaacctttgaccttcttccccagagatacgtcgtcgtcatcatgactagactccgtcgactctcccttgcgacggctagatttccatgtaccaacaatggagtccttgaacctagaaggaaccgctcgaactctgccacgcgaagacttggactggtcagagcaaacttgttgagattcttctttgcttgtcaaggagcttgagctactagtaagaagttctggttctttgctacatggttgatccacggttgctctttgtctcttcttatacactataatctcaccctttttcctcccatactcaatttctgaatcaattttgcaccgcttcagattctgattctcgaatgtcgtcaaggtccgtttcaaaatcatatcctacctaagcaatcctcgcctattcaacataaacgactatccaaattccgattccaaaaccctaatttcatcaaacaaaacagatttcgcacttcggacctccggaaggaaaaagaagaaactcgtaacgtttaaattcctctcgcaaattggctcaatagtcaacgaacccaatgcgaaaccgcttctctaaccctaaattcgaaaacgaaaaccaaattctcgtttccctcaacaggatagaattaagaaatcaaacgacggagaaatcgttaaactctaaaacgacggagaaacaacaaatcctcctcgtagattccctggagaaaattatcagtcggtttcagtacggagaagataaaaccttaaaatcgacggcaagggaaaacaaaagaggaggagaaggatctttgtgttctgatgaaggagacacacaccgtccgtcgtcggtttatatatttctccttattattattttatggttaattctgaaattaattcgcctaaacaaataataaaaacgaaaataaaaaaaacgaatatgctgacgtggcggttgaatggaacagtgtttggctccagggattggggacgagggaagactgcgaattttcaggcgtacgagagcgccaagtcgaaatcttccttttcatcaaatctgacgtggcgcatcaataaataactctctcgtttttcttcttgtcacacaacttatttagaaaaatcgaagcttgttgggctacatattgggcctacgatgtttctcgtggaacattttgacaattaataaaagaaacaacttcgagttaggcccaatatgaacactgtatgtttctcatgcaacaacattttgacattaccagacaatggaggaagatgatccttttttcatttcaaataagactcaaaacttatcatccaattatacgttcatgatttatatgaaagatgagagattgcatttgcatacaaaaggaccatatttttgttaatcgctccataatgttagccttagggtctagggacgtctatgcacatttacaaactcataaggaattaaagaattacgtatatttcactttccaggaacaacaaccttcaaaactcaacttacatgacaacaaattgagatccaaaaagaaacaaaccttaaaaaaacaaatatcaccatgttgctctaaagtctaaaccaagaccgatttccacttgaaaatcatattgccgaaccaaaaaaaaaaaaaaaaaattacaacacatatggactataaaatcagtgaccaatgattatggggaaaacaaaaaaagtacctttatgtacaagaaaaaaaaaacagaagatcttgaatcaaacactagtactagaacttggatgtgtctcaaaagagggagggctgcgagaagatggtgagccgatagtgccacgaatcctgaatatttcaagaacaacaaaagcaagtaacgtgactgacagaacaaatccatatccaattttccatccatctcctccattatccgccattcgaattccaagaacaatgttcactgctccaaaaaagagagagatcctcccaatccaatgatgataccaattccaatatctcctcatctttgtctccttctgtggccgtgcaaagaaagccaaaacctgaagagtgctaaggactagaagaaagatcccaatgcctcgatgcgcaggtatatccggctggatcctattgtaaagctgaatcccaagaataactgcggctaaaccgaagataaagcccgtgaactgaaaaccgatatgaagatagtaccaaagagggtctttatgtcttagatatcttgctaggattgcccctacaggaagtaagaaaccccatccgagtatcgccattactccatgttttgtcttctccgtagaagttgtcgtctttatggaggttgctccactagctgcattgaccaagaacatacaactattgaactctcccctgtttttaacatgtatagattagactagtatatacattatattacctttggaaaaatcgacgatgactgtagttttatcatcatgcttagtcaaacggcctagcttggaaggataagcagtgctaaacgctagaatgacagctctccgaggaactctaacggcgaatttcacctggaaagctaagtaaatcattgctccgtgaagagccaccaccggcgggactttttgtagttgcaattctccttgatccggcacaacttggtctctctccgttccttggagatagtattgtttgattttggcgtgaccctttttcgaaatccatccgatcatcgcgcttgatccaaccattcttccttctttcgagaatccaatcccaacccacccggttgtgtataaagccgatactataatcgtcatcacattgtctctgttttctgagtactgcaaaacagagcaagcagcgttgaaaatcaaaattatgggttttaggaaaagttggtttatgtttttcggtttacccgtaagacgaacgtgttccaaagaggagtacagggcatgttatcggagatattgctgtacggtggagggaggaaatcggataatcggtttgcaaaacagagattctgggtcgaatcgtttatgacattgacgtcatctgcagctaagaaaggcagatcttgtccgattaagaaacagaggatgtaaaatccgaccaaagttttcatggttggaatcgaaacagagacgagaaggagcgaggaacaatggaagctttttgggtgatggttacttgaagaagaagaagagtgattgagtttggtggtgaaagtggttggagatggagatcaatcataatcatcaaattgttttaaatcagctccggttggattttgagaaagatacttggagttgatgtttcactggttaagtatcggacaatttatgtcccctctgtcactaaatcgacacgtgaaccgacagaaaaataccaagatgctatgaaattattgctttttctttgccagttaaaacaattggcaattgctatttgaggttgagaaattacgaatagatttttaagatatggacaatctggagttttttactttgcttatttagggaaaaaaagaagaagaagacagagatgggagcgagagagtggggtcgtaaactggaccatagtgggaagtggatcagtcttagtctgaatcattactcattaggtatatttggtcaggatagtgccacgatcaacatcatcttttcttttcttggaggagatattggaagggaacttggaaacaaagtaaacaataataaattaaccaatgagtacagctttacagcttccatgagtaccaatcacacaaacaaacaatttcatttgttcgttgtaaaacacaaactcaaatgagaaaaaaggtattgtgttgcaattgcaaaatggtaatgtaaaacaatttaaacagtattactattacgcatggcgggatcggtatcagtcaacgactaagcgttttatgtaatcgatatcataattcaaaattattcaactttaacataataaaagggattaacataataagttagccaatatggggatgtagctcatatggtagagcgctcgcttcgcatgcgagaggcacggggttcgattccccgcatctccaattttgttgatttttttaattttagtttgctcttcttcttctgtttgctcttcttcttctgtttgcttgctccttttgttctctctttccggtggtttaaaacagagaggagatcacgtcatatgtttcttcagtccatgaaatctatttattttttgaaaaataatttggtcaaccatattctactgcgccaaccatcgtcttacaaaaacttttattcagaaacaatgataactcgaacaccgaatacaatgacaaatggaaaaaaaaaagagacaaaaaaatgtagaaggaaacgtatcctaaagaaacaaaaaatggagtgtgaagagagggtctcgtctctctacttggaccaagcaactgcttcaatatccgtttgagcacttctatacaattccagcctcttcgcaatcgaagtccttcgctgctgaaccgcaggatcctcatccaacaatttcgacaatttgctcatctataatttttaacaccaaaccattttaacattcttactcgtatcttatacaattgtcaatttgctcatataggttttttagtatatctttattgttacctctttctggccaagttcggtgaagaagatgtctagaaggcttcgttttgcttcacggacttgacagtaaacaatggatttcggtatggagtttctcaagccagcgcagaccatgttcacatatgacaacacatttgagccgattcttcggagataagcatcgttgtatctgtcgaatatcgaatgtgtcggattcccacctttttcagaatcttgcgggagtttcctgaagaactcgaccgttaagtaaccagactccatgtccactagtaacagagttgctttcctgctttcgtctctcattcgatccaatgaatccacggctgcacctgatacttctactctgagtgttggatattgcttcagttcctgtagtcatgatgaaaacacataatcatgcttcaaaactcataagtgttattgttgttgttgggtttatgactttgagcagagatattcttacagatgtttcgcccatggatttgtggataagatccttgagaatggaatgaaccgcatcaacagctgcttcagcagggcctctaatggagactaagcatgattctatgagccggcgataaccttgttcaggagctatgagatgaggttgatatccatctgcttcagtgatcagtttccgtacattgtccatggagagatgtttgtcgaattgcagtcttttaatggcagctgggaattgattgtcgaacacagaatttatcttttcaccacctgaacgcctgtaaggttgttagtggttatcaattataaagctagaaaattgaattagcaacaatccagaaacatgcggatgacttacgtgccatccaggtgttctttaaaagtttgatcaaaggcacggcaaatttccatgatcatataaagttttccctgcattcaggagaatgagtattaacgaaggagggatgtgaaatgagacaagaaaccgaagaatgaaaggctaaaaggtccttaagacagaagatccttacaccagcatcagctgctacaggcttcccaagacggcttagctctgtctctaactcggaaattgtctttgtgataagagactgaagtcccgggattctagacttgataacaacttccaaatgctgaaaagttatagctggttttagagcaactacaaaatcttttatgctaaaatcttcatacataccaagctcctcaattatataccttagagagcatctttcctaaatactctgaacccattctttcagttaaatgtctgtactctgggctagtctggaagtaatcacgttcacgccgacgagcagcaatcatatcaacacttttattaatgtcagcttgagaccggtttacaacaccaacccaaggataccttaatttgtatccccttccttcaagtatctgaaatctccaaacatttagaatacttagggactgttaaatattcactaaccattctttagtgagattctcatatttatcttcattgtgtcctttcataatgcagttagagatagattgcttgcagattagacgataatcttgactaatgatatgtagaatgtattactatcatctgaatgtaaacttacatcaacagcattagtgccttggtccatgagatcaatttttgttaaaactccaaaagtcctgtctcctgatagcataaagtgcagcgaagcaaacattaaacaacaagaatcaatcaattcgaaatactatcatcatctaagcattgatgatgctaatcaatcatatatacaatgctccatagaacttaaaccatatttaccatgtcctagtcgcttatatctcacaaaaaagaagctcaaagtgaattcagaaagcagttgtatcaaaatataaaaaaggaagaatctggcacctttgggatcaacttcacgagagatcttaatggcatcagatgttgcaagatcctgatttgcaggggaaatagcaagtatgatgcagttgggctgtcaaaaggtgaatgatcaatctttgttatttgcttgaacacacgacctttagaggatagtagcatcatctttccacaattgaattctgctacatacttgtaatttctttcaaatcatagttaccttctcaataaacgatctgaccatgttctcgatgtcttgaacaatgctttcaggctggccatctacaacataattggcaccatatttcattactctttcactaaagaggacttggggtgtgggatatcatggaaaacaaagactgtctcacttaccaacagctacctttgttagcccaggaagatcgacaagtgtcaaattcacaactacaaacatttgaagtaaataaaatcgttaagagtatggagactggaagacaaatgggaaagatggtagaaaacataaatttaagatttgattgaatttcacaccctgtgtacaagaacctaaggatcctaaagcatgtttagttaatttcttaatgcaaatgtaggaagtacaaaggcttctcttaccattaggagagaagatactgagatgaattgggactgtggatattactttgctgctgcgaccagtttcacgatctgtctcatccgagatctcctgcctcacagcagctacataacaaggaagaagatgagaagaatgtgggcacgtaaacaacactacagatactgcaagcagtcacaggaaaactaaggagcataaactcctcccaaacaataccaaaatctgtgaacttcttctttggaagatgcataaactctgcatactctttcccttcatcaattctatgaagctgcaggacaagaggtctgcgtgtaacaatccctacacggaagacattgttgttctaagtaagtgttctttcagaaaataatcttcagatatttttctaagaaagcttaccagctccacgaggtagaaaatcttttccaacaacactctctagcactgaagactttccagaactctacaatttcatcaaatcgatcggattacacgcattgcatgaatactcaacagtttttgattaagaacaaaggatctcacaacagaaacattatcattagtttcgatcaaatcaatgattcaatgggagccatcagacgattcgttgaaaaatgagatgagattatttctacgcaatgcctatgatctaaagatcaccgattcaaaattccatgccaaaaatcaagagaaagagaccaaacctgaccaccgacgacggcaattgcaggcaatgagtcccagagagttgggagggagcttccctcgccgtgatctcccagagccgtacaggctctctgaatcttgttcacaagcgcaatcaaactctccataacggaatcaaaactaaggagctccgattaatcaacggatgaatcaatcttccggcgagatttggtctccgacgggtccgtatgagcaggagaagagaacgcaaacgttataaccgcgagaattgctatcattcgggcgaccgttgaatttttctcagaaaataaaaatatataagctaaagattcataatacccaaagtacccctattgaaaagtcaaaccttgtagcaagcccaaaggcccactttatttgagcccagttatcctcttttggacacatttttggtatattcgagtcacgatactcgaatggtatttccgttataatttacgaaaacaatgtctcttcttttctctacaaccacacgatttcgatgttaattaccaaaaaagtgtgtttaatttagctaaactaattgttttcgttgattaggcccagttgggttgaagaaaatctccaatctttcttcgccaagtctcccacaacactttgtgttctaatctctctgtatgtcgcaaagtagcagcaacttaattctctcatggagtctcttacatcaaatccttccttcgcttgtttctctaaaaccatttctcattacccttctcgtttctccttcgtaaagctaacctctatccaaaagttggaagcttccaacaacaccttatcgttattctgctgtaaatcatcttcgaatcctaaaccagattgcaatcgtcgtatcaagttaaaccctttatgtgtattgcgtccaatcattcgaacaataaagggtttggtttcttctcaatccaggcaatggatgtctcgttttcgagcttacagagacgacacggcggcgttttctgaggatttcgctggagatttgaagcataacggtggattagggattgcccttttgagcgttactgcttctgctaagataaagattagccctttcgttgcgacgctctctgcgaatccaactttcgtttcagctgtagtcgcgtggttctttgcgcaatcgagtaaaatggttatcaatttcttcattgagaggaaatgggattttcgtcttctctatgcttctggtgggatgccttcgtctcactcagctttatgtatggctttgacgacctctgtggcgctttgtcatggagttgcagattccttgtttcctgtttgtttagggtttagcttgattgtcatgtatgatgcaattggtgttagacgccatgccggtatgcaagctgaggtaaaaagttaaaccaaatctgcttcaagttttgagttttggagatttttacagagtttgactttggtcttattaaatgctttgtctattctacaagttgactagattttcatgttgatgagtgtgtatagtttaatgtattactatttccatgttgatgagtgtgtatagtttaatgtattactagaatctggtgatggattcgactttcactacattgttgaatttttgtgaatgcttttatgtgtaaaagttggcgtgcttgagttttcaatgtgtgcacaattgaagtacatcactagatttggaattatggagagttagatgttgatttctgttcttggttcttgaatcttttatatgatggttttgcattgttgagagcgtaatacaagtttctcgaaattatggacattgggcacatgttgatgatagctgttattggttgtagaatgaccttgataaaattgcagagaattaagagttttgaaagaggattcacacagagtctaagtcatgtttgctcttggttcttaaatcttttagatgatggttttgcattgttgagagcacaatacaagtttctcgaaattatggatattagccacatattgatgatagttgttgttggttgtagaatgatcttgataaaattgcagagaattaagagttttgaaagagggtctgtacagagtctaagtctagtttgttgttctttgtaagataagattaacaatgttttgtatttgttgatgtcaggttctgaacttgatcattagggacttgttcgaaggacatcccatcagtcaaagaaagcttaaggaactgcttggtcacactccttcgcaggttcttgctggagcattggttggtattgtgattgcttgcttttgttgccaaggctatctcgtctcagtctaagaagatgtcttttattccaagtgatctggttggtttttgatttgggtagcctaaaaaaacagagtgttttaagtatcgcttaacattgattttggctaagattcatgttgtagtatcatatgttttgttcagcaatagagaaaactcttgtttcttcttccttgtggcttttatttttttgagtttttgtattccctgagaatgcaatgagagcttcttttgtttaaagcgtttaaagcaatgcatgacatgttcagtgactgctgcagaaacacacacacacacacacacacaaagttaaccataataactaagatttacgtcattagagcaagcaactgaagtgtttagtggagaggatagcacagatatacttgagatctaacggccaaaaagcagtttcttagctcggaatgttctcccgtaagatctaataaatcctaaaccccttgatcattctgctccaattagtttatcgtgttcgtttcgtaatcttccgtctccttgaagcgttagatcttgatctatgcgttgattgatgatatatggtttcagacaataaagatgggagagataagaagattttcgtagatctttattttggggcggttgacaatcctgcaccatcaaatgtgatgctaatcatgggagacatctcacaagaagattgcatcatcacgatatgaaagcggcaaagtacaatgttatcttagcacagcatcaaaacccatcagggttgttactaaccattccaagctcactatggctttggacaagcctatcagctggagacaagcctattgaccaaaccggaagaggacagcttagtgaggcaaaaggattactgattttgtgtagccatatgtgtgaataccttgaacctctctaaatctcttgtttgtagaaaactctttaaattaagtaaactctttatttcttcttccttgagggttcttttttgcgttttttgtattccctgaatatgcaatgagagcttgtttttgtttaaaccaatgcaaatctttatgatgatgacatgtttagtgacttaatgcatcagtaacttactgtaactctcaaactgcacaacagattaagcatgttagagacagactatcttagaacagataatcgacaacaacaaatttttgtgggtctcttagagggtttaagaagaactgactaatacgctttggtgatccaagaactaaagtaggatcacatactctctctctaaccaacctatgatcaatcaaaaaggcaaggtttaaaacacacaacatgtgtctatcatacacgaaaatagaagctatttatttgggggagattgtgggaatgggcattttgtaagcccaaaaaatatggatttgagccttttcagtcctttggatttcttgtgcataaaagggcccaaattcgttgaacgaattaacatatgtaacgaagaaagaagtagcccaaattcgctggacgaatcaacataacgaactacgaaagtaccctcagctatcatttctaagtttgcctccaatctctgtttgctataggccctttggattggtgcctcagctacttttcttgttagaatctttaagagcctgctttgatcgttttcttcttcggccagtaggtttggtcttcaggttaaagacacctttcatcaacgagcttatatccacagatcgttctcccatgatcttatcatggtacatcttgcttcctatctcacagatctcttcctctacttcttctaatggctcgtcaatattcaacttcagttctcctttcctaataaccgttacaccaaatccattcgccttggcttctcgatatgcatcctgtgtaggttaaagagaacaactttgaattgataacagaaacacgtctagttaaagtttcttcattggctaaattcattacctttggcgggcgcggaacaatgaaaacgtttccacttcgtagcatatccaaatgagcttgaataatgtaacagaggtttcgacagtctgcagcgtcctcgaaagcaatcacatgatgtggtttgggttctaactcgagatctgttgccatctccaatgtgtagaaccctacttgctgctctccgttttcatcaactgtgtacaactcaaggcactaaaacatgaaaagacatatcagattttcaaggacttttgtgtttctccaatgtcagtcaactgtttagcaggaaaacataccagtacatgcggaaggtccaaccaccatagataatcttcttccttatcttctccatactcgcggtatttgctcaaaacagcttgaggaccaaacaactccatctctctcttgagtttgttgagtttcttttccatgaacttcttgttcctctctggcagcttttccattatatcagcagcgtctttgatttcgtcttcagtaatccatcggtctaagtcttttcccatgtctctcataacagctttcacttctggatcagtctctgcattgtacaactcaaggaacccacgtgaccacttcttcgtgtgctgccaatactcctttcctgattttttaccaggtctaacagatccatcacttccttctacaacaatctttggctggcttgaggtaatttcagatgaaggggtgagagtgttctcagaggaagcagactctgataattcctgatgagagctctgttcttcatatttcacaggagatacagatgcagctttttcagaaaacagtgcttcacgctgttcatgatagttattgagaaactcggggttcttatcaagtgaaggccctttccatctcggtatgatcttttctagtggatcatacacactgacgccatctgaataataagaggaagggagatggttgagatatattttgacaagctgattaatgcataatttgtgtacgtaagatattgagcaaactgagtctcaatcaaagttgtagaagattacctactccgtagtcaaggttttcaatgtttgaatgaatccactgatgcagatgagacagtttctcattttctttctcaactttcttctccaagccttgcaaaaacatagctttatcttcatcatcaatcaggtgaaatggatccctaccagccagctcattatctcgaacatggaagacaatgtcccttagcttctcgtccttcatccactcaagctcatcattatactcactgcggtaaagttctgcaatttcagcaattgtacctggctcccgagtttcaccctctctagcagccatataattatccctaaatcctgctctcattttttcaacaacaggctcaaattcatggtagttattctctatccaattccccttccctgatggttcttccttctctatatgttcagtaccaccagaagaacttttggcaaatttaaaattgtgctcttcgattttatttgaagaatttatttgcttgctcgatcccttaactgcattcccaggttctgagagtttttggtaatcattcttttggggttgacaatcagcatccttccccaacggttcagaagaagtagactcaagtgcagatttcaaggttccattgacagctgcaccaaggattttatttttgtcaaccaattcgtgttttctagctacaccacgctcttcgtcgctctgctttgagaagatttcaacactatcttgggctatcatctgagaaggttcctgagtaagctctttctcaccacttcttcttgaaaggaactctttagcctcttttacagaccgtatgacccgtgacttacgaccagtgctattcttcatcatacttaactgatccttagagacatcagaagattggatgactccgtctgtaggaactggtggtaccacattactcaccttttctttgtcagatgctgccatttcatgattcagaaaaccaaaatctaccatagccccattcaacatcggaacagcaaaaccagaaagttcagtgttctcactgtcagtcgaagttcccaagcgttcatctttatcatcatcaccttcactgtgtgtcaaagcctcatgtggaagactcttctgtgactgaatgcttatatcttcctcattgtcgcctgtttctttgttcacatcgagcttctgcttttcattaagttctatgccagcttctatctcccgtgctcgtctagccattgctttgatttcatggatcttatcaacaaagtccagctcaacatgaggagaattcacgagttccagtttcttctctgaacccttaactttagaaatactagtcataagttcatttcgatcaaacttaggcttctcaaatgacatcaatggcttttccaaaccctccttgtgcaaaacttccacggtacctttctccgacatatccctttcctgccaagctttcatctttctcctcatcatctccttctccaactctgtacactcaacctcattactcttcctatacacaagcaccgtcttcagcaaccagagtccaatgtaaccacacaaaacagctcttccaatcgccggcaactttggaattaagtcaagacgaagaattgcgttttggactgagctaacgagacgaaactcttcctctgaagaagaagaagaagaaacgaacttgacaagagaactctccttatggatcacatgttccccattctccatttgttcagctaatttcttcgcatatacaagcttagaactcactgattccaaatccccaagagctgatcttcttctactcaagacctcgtcttcatcaacctctactttctctacgtttccaacagaatcctgatagacagtgaaaatgggattcgaaccaataccccaaaactctgcttccttgttataccgagcaacccaatcttcaagctcattcagcaaatttgaatcttgagcaaccctatctttcaatccctcggtgctacttaaatcatcacagtgaccaaacttatggctttcgtttagaggtttcgtacctggttcagaagatttcggagtcgaacgccaatactcatcaccgatgatcttcttcctcagcgaattacgtcgcctcgaggtctctccgaaccgagccgagactcggagaattgaaacgcgatagtagtggaatttggagatgggcaagttgaatcgacgttggttagcgagtctcctgttcgaattggacgagaaagacgagaaattgaagaaaccatcattggagtttagtagaacctccattgatggaaaccaaagggataaagctcacttccgagtgagaaaacccccaaaagctgggtttaacagaacaatgatgaaacgtcgtcgtttcttaaacaaagctaacgcctttgaacaacactacagttgaaaaaaggttcaacattttacattttccagatataaagctcatcacttccaagttccaaaagctgggtttaacagaacaatgatgaaacgtcgtcgtttcgtggacacaacacaagcattacataaatttatgaacactacagttgataaaagtaaaaggttcaacattttacgtttttcctccagatatagcagaattgtaatgaactatatattttataataaaaaaacctccatgacatgagaaagacagagagagatacataagaacaaccccaagtttatcgtcagagaaaaccctaattacagataaccatggttacagagacaaggccaaatcggtgaggttttcaaaatcagtttgattttttttttttaattttcaagacaagtttgggatacaagctcctccaccttcaccactttgttgttgctctttccatatccttccagtgactcgaagtttcagctctttcctatctccacctgagaagaagagagccatgtttctttgtataattagtccatcatgactgtctctaactttcctgtggctgtctcttacgcttcttggtgttccttcccatatcagcttccgaccataacctcccacttctaaactgtaattgtagtttcgagcttctgtctcgtcccccatgaaacgcaggaacgccatgtagactggagccattccgagctggaatgcctcaaagtgaagacagaagtattgaccgaagcagtgaaagacctgattttcatttttgaaccagaaacaaaaccaaaacagaggaaaccttgataagcattaaagtatatcaagtcaacatgtatagcgagatggaagattcacaattcacaaccatagattagataaataactggaccttctctaggaaagctaactcgcaacaaaagcaaaatttgactcagctgatcacattacagtttataccagacagatcaaattttatcacaaatataatcctattactttaaacaaagcctcctaacttatctaagtgtatactatgaagcacgattcatatgtacttacagttaacatccatgtggcgttttcgacttcacgaggattagacttgacataacgatggttgaaagtacacccagaatgcatatccaccttatgatcatccctcagatgagcaactaagaaagggatatcgcccgtaacagaacactcggatccagcataagggcagctataaggtctgaagttacatacagtctcatgtttgagcttactgtaataagggaagatttcaggacatccaagtgacatgtgtttacaaggtagttcaagtgattcggctactttttccagtgccaaacaacggatatcaccgagctcttgtctacaagttgggcagcggttgtgaaccctggctttacaggttgaacacaacgtatgtccattgtgacactgtagggaaatcaaataattgtctatctgttattccataattctctaaagaaacaataagaagaatcttagaaactatcaaagctattgacaaaatttagtgacaattgtttcaattgtagccattagtgaatggataaaactaaatttcaagttacaagagcaacacaaccactgcttcaacatccatgattcacatcattaactcaaaaccctaaacaaaatcaacaaattaaagatccggggaaacgaaatcagagaacaagggattgaaaagaaagacctgatgaatgggagggtacatagaattggtgcagacaggacattcgagaagctcatgaacactggtggtggtagggagaagcccagaagcagcagcattaacgttggtggtgttgttattagtatgatgatgcttggaaacagaagcgtaggaatggcgatcttggtggatctcttcatcatctgtcacatccatggttgatgtacagtccatgctatccaaatccattgaagaaaggtggagactttgattgatcttcgatcgaaacgaaagatcaaaatccggaattgaagaaacaccaccgaaacaggtcaaccctcgtgaagtgttgttaattttcaaaaacaaaaaagatagatgctcttcttcatcaattctctagagagagagagagagatagttgccgtcaaatgaaccggaaacgctgatttaagatcggacggtcacaaaggcggctgtgttaaagagagaatgttatttggaaacaaattgaattataagagattcagaagaatttactggataggggaaaaataatcatattctaataatatacgtacagtatatcctctctcactcaatgatttctttgtttttaattaaagggccatgatccagtagagatgggcctaaatatgtacatggtgcacatgattgcttctttttttttattctagatgtttttctctctagtgggattctgtctatcattattgtgtgttctttttttacttttaattcaaacaatttcttttcctttgtacaagaaaaatgattttcaacttctaaaatgacagctaaattcaaagattcatgaaaaacatgctcatctttctgtttactttaacaaaaactttaagagatgtatttaggtaaaattagacggtttaagaatatgaaattcataagaggaataataagtaatgggatgtggcttgggttcaaagtcacttcaaagaccaatgataatgtaaatgaacattttactcttcttcatctcaagcaaactctcacaatcttaaaagcaaattattcaattaataattgcttctcatcagtgatcggtctcatgagtgatatcatccttaaacacaccacataaaagaaaaagaaaaaagcgaacaacaacgatccatccagcttcaatgatctgtcgttgctttttaacagaacatgtcaattgtactattatctttctgttgggttttgtgacttttgtctgagaaaaatataaagcttcaaagaatctgggacttgacttaagaactgttttcacagctacaagagatcacaagcggatctgattattcattcatcaaatattctttagctttttactcctatttgcatcaaacaatcaaatttaaggcactactggatcaaaactagaaagattttagttatttgttaccactggttagccgatgtatcccggcacttttcatcattgccctgagccaactgctgtggattagtaccttttactcgattactaaacagtctctgggatattctatctttagccgttgttttcttacgccttgtggaaaaggtttgcttcttgtttttcttttcagcaaaaactctatcaaactcatcatccatagcattcgatctagaagttgaggctattgccgcaccacgcagaacttcatgattgtgttccttaaccttaaccttaacaagctttgctcttttcctcaccacttctttgtctttctcccggatattcttcagagcctctttcgctatttgcctagctaactgattaggatcagaatctgaagttgtttcatccatagacacatcctggttggtccctgaagttgaagaagtttggttttcactctcatctaatggagattcctggattatggtgtttccttcatcatcccggggtacaatgggtccgtgaaacggacagactctgagatctcttctctggcaaagaccacctttctttagagaagcacggcatggaggtgtctctgttctctcttctctatacacggttgcctgaagattcaattctgctattttatctgctggaattatagcatcttgatccaccctgccccagtggctctcgatctctaaaccccggtaattagctcgaacttccgtagttgattcccaattagtcaactgtgatccccaattcatcacaggcgcttcagaaattagcttgtctctaagagagtttccactgcttccaacttttttagtgttcgacactttattggacctagcttctgatgtagacttctttgcttcacctgatgatggtaaagatgaattctcactctgctgagttctcatcacatgagccacgttcttgactgaatcagttttaaccttgccatcatcctcctcccagatatcttcttcttcctcgtttgtttcttcattaccgtgaatatcagtcattcttgacattgtaaaaccagcttcttcccatttctttttagctgccaatatgttattcctgatatcaatcaagtccttcaacatggaatctctcgttctgttatcacttacgtcaaccctaatgagaagagagatcccttcttgaaccgagatcagatgctttgtcactagaagcttgcactgttccctcaacacatcaaatacaattctgttttcaccagtttcttcaaccttttctgattgtttcagtgaatcaagacgaatttgcctcagatgagaacaacggatctcctcaaaatcttcctcatctaagatcgcaagtggaacaccatcatcccctctccactgaacaatttccatacactccttgatttcctttatcgttacctcaatctcatacttgaagagtccaaaactaactctcaaggaatcaaacttgttccgcaaaatctcttttgtcttcatctccctctcctgtctctctcgttgaatccgtgcagcattagcctgtaaatcagggaactttaacttgagggtattcttaaggtaatcaaacccaagtctaagctccttgtaatgaaacccaaaagacaaattccacttctccaagaactcaatagcctttgaacgcaacgtagtggcaacagcaggtggtgcaggaagaggcagattgcttctaaacccaatacttaaactcaaaagctgatcaagattctcaattatcaaagttctaaagagctttgatctcatgaatagctcgtcgattatgaaaagcgtcagatatcgaacctgtcaaagaaaattatcaccgcgttatttgaccaacaaacctgatcaatcaacattgactagtccttaaaagagcaagtttcaatgaattgaacggatcagaaattgttcaaataatgtgaaaaaaacctgagagtggttatgtctcatgagctccattagggtttgcgaactaagtcggacctccgaatcagaatagcgaacaatggatttgatcgccttgagaagcctcgggtcaacctcttgagcagttgatttcgtcgctttctctatcaacccaataactttccctccgccgtcatctcttccttccatcgccggcaatcagaaattcagattttcttctcctttctaatttccgaagaagacgatataaaaagaaaaccgaaaaagaaaaaattagatttgtgttggtttaatatttgtacccactatagtcggtttacttggttaaacgaaatgacttatttacccctctctccccaattggttcgaagtaacgtatttgcccctgtttgtctaacctctattcaccaacttagatgggtgttaatgtaattacgataaatatcgtttatatagttgatgtgaagttttcctcttcccaccaaaatcactcaacacagtcgagagaagatgaagatgatcctgatgacgacgatgcaaaacgctttctggattctcttggttttttccatctcaatggcttcttgctccacgattccatcgcttgtaggtaaataatctggtgattctgttatacttttcccgagaaaaaattgattctttttctctcattttccttcactttctcgttcgttttccaggtccacaaatcggaatcaactacggagaatacagctccaatcttgaagatagtagtaatcttcgattccattgtgtgattcacgagaacatcgaatctttttaactctcaatgacttttttttgtttgtttttccaggtccagtgatcggaatcaactatggtcgttacggctcaaacctaccaccaccagaagcaataccatcgctagtcaactctctctccatcaaacatgtcaaaacctttgacttggatccaagaatcaccaaatctttcgccaacactggaatcactctctccctctgtatccccaacgacaagatcccatctctagccaccaatctctccgaagctgaatcaatcatcagaaacttcatcttaccttaccacaagaacacaatcatcacagcaatctccgtcggaaacgaagtctccttactcccgcaattctccaaccacctagtctcagctatggtcaacgttcacaaagcaatcaagagatacagattacacaagaagatcaaagtctccacaacgcattctctcgcgattctttccagaagattccctccttcgactgctgttttccatcaatcgatcggtgattcggttttggaaccactcataaggtttctacaaagaacaaattcacctctcatggtgaacgtttacccttacctcgcttataaacaatcattcccttcgattcctctggattttgctctgtttcagccgatgaacagccccagacgccggagatacatagatccgtacactggagttgcatacaccaatctgttcgacataatgctggattctgttgactccgccgtgaaatccttagggttacctgaaattccggtggttgtatcggagattgggtggccgacgaggggagatccgggtgaaacagctgctaatttggagaacgctagggtttttaaccaacggctcgttgagcatctgagaagaagatggaataaagttccggtgtatatctttgctctgttcgatgaagaccagaaaactggaaacgccgtggagaagcactggggattgctttacggtaacggatcgaggaagtatgatctgaatttctcgccgccgatttgaagtttgaacggcgcaaagatggaagaagatttatgaggtaatgggcctattgttttgttttattatgggtctattgaattgtttttagaccaggccagtattacgacatattaatccaccgggcttacttgtaaataatacaaagttgataaagaaataataaaaagtggagatgattgaaggcttgtgtcatgtttttcctttgtcccatatgtcacgtgcaagatgatagattcgtggacttggagtcagtaatatcaatcaatctaacaaaacatttgtcccggaataaattggaaatgcaaattgtcatcatgttactgaaagttgtcctatattttaaatttagttttaacagttttattttatttttatatgaacgaaataaaaataaaataaaagaagtgagagccactctatttacaaaccaatgaaaataaataagggtggaaatatgggaaaaatggaaagtaacgttttaattgtgttgatggataatgtgtattttatgatagaaacaaataaaatcaccttgttataagttgtaaggctccaaaatcacattaaaacatatgctagtgaattaccaataatttgacaaatatgttaaattcacataatttattgagagaatggaaatcatgactcgtgactcatgactaatgactaatgagtgagtcttgttgttgtatatagagactatatattcatctgaataataagtttctagaaggctgaattttgataagaggagcataaaaatgactgatcacacatcgcccactaaatacgcaagtgagtgagtgatcggagatatttacggaggaaagagcgggaagggagtgggtataaaattggtggctcgttcggtggttgcattattctgtccatgtgggccaacgtaccgcactttgtctctgtatccgtcattgaggatttttttgtttattttattttcccatctcacttatgatttttgttattattaatgattagtgatttgttacttactgaagcaattattttgtcaaaatagagactgcttcacataacacataaaaccaagaactggtgtcggatattcacactctctcattcacatggagaaccaaaaaccaagaacatacgtccatcttgcattaacgataccgtgtgtcgtttacgataggcacaatatatacatatatgtacgctcataccaaaaatatcgagatgcactaaccaatgccatatataacatgagcattgagcacaatagtaggatgagttatgaaaagaaggaaaaaaataatcgctactaatccaaagcaagatgagaagatacattgaatttcactttaaaacgagcacttaagctagtgaattaccaataatttcattttggtttaagaaatttcaaaggacaaaagcacctttaagattcacttctctttgacttttgacagtacagaagtactagtacaatatttaatctagggatcttcatgaatgatgactaatgagtagtatgatagtcgatgatgataacaatgtttgataatttgctttgtcaattttctcccaaaaagtctttgggaataaatcagtcaactcaagctcaaaatctaacacgcgcgagacaaaaacccgacccgtgacccgaccaagtcataagcgacccggaaaccttgttgctgtatgtttccaatgattgacaaactccccatagttccggcaaacgcaaaacagaaccgtccttcagtgttaaccgggatcagataattactcgccggaagcgaaacctctccgcctccgaaatgaaacacaaccgtcggaaccttcacagtcgtcattcccgagagatcaaaacacgtgtcgaacaaagaatacgatggagcacgtttcagcttcgtagcaccaagtctaaaagcgtctctaagcgctacgtaagcaggttgcgtcagccgagtaaccgaagtaccggaatctataatgacaccgccgtttccggtggcgtcaagcttgaactgcgactccgaaacgccgggaacgcgcgaaccaccaacgctgattccaagaagctgcaagtaataaaacgtgtcgagtttcgggttcgttagtaacggcgtgaaaacagaggttttcggaacggcggcgtttccaaacacgattgttgacggtggtttagaagaagaaccggaactcgtccggtcaaccaaacagtaagagaattttccgttataacggtttttcgtctgcgacgggaaagataacccaccacggcccaagcccaaaagcccagccgcaccaacgaacaagccttcgttatcgtgaccgcatcctaacggcacgtgatcaacacgcgctccatgaaacgtcagcgtttcagttgagaaatctccttcggtgaatgatccgtcaccgtacgatacttggtagagacaagtcttgcttcgacgagtgacacattccgacgagtcgtctagtctccggcaaaggcgagatccacatggtacggtggcgaaagttttggatttcttcgggtcaaaaatggcgtcggtctggttgtaacaggctttgcaaggagagcattggagccaaacgacgtcgcttcctgtgtcgagcaccatgtaaacgttagtcgccggagttccaacacctaacctcataaaatactctccgcttccttgtgagaggccagagataactgcgccgctaaatccaccggcggtacgtggagttcttttcgtagcatttcgtccggttgatacggcggcgaggctggtaatagatttgacgcggagagagtctcgttggagacggaggttgaagaggtccgccggagatgcgtcggagaaggaagacagagcatccacgtgtgataaatggacagagagtgaagttgtggactcggataaagattcatcagttaaagattcggactcgggccatgagagtgttgcggaagaaggaagagtgttgacgacaagagtttggtattgggaagaagcagaggaggtgaagaagagaacggcaaagacggagaaggcgagggtattcaagactttgcgctccattggaaatgaaaatatgaggattttaactattgtcacatggatcttatatagactatagtctgtctatctatctactcaaaagtatacaaaggcaaaatgaagctcgtgtgtgaaagcacatagtttactttaattatgtaataacgactttgttttttctttctttttctttatcattaccaaattattgactttattccccatttcctactgacgaagtaatggagttctaattttgtagcttggaatatataagattattgggtgagacggtgcaaattggttccatggtctagtggtcaggacattggactctgaatccagtaacccgagttcaagtctcggtggaacctttaaattagaatttttttgtttccattgtacacttttagtattcttgatgagactttagcccatattttttgggggcagggtggggcttcaagacatagccaaaaaatgtctaagaggccactgagaattatctctaaagcatttgagttatgcaataagccaataaccaataaggatagataaactatgtgggctcgttgagtttatgtacttaaggcctgatatctcccttcatgggttgtaaaatttggagtccatcatattaaggattaccggaactagcagtttggcaatttagttggatttaatagtttggagattttgtgtgaagcaagcatacagaaactatgaagataatacttggggtttgtatatttttgaagggttctttacttattttatagaagaaatacgacgcttgctaaatatagcacgaaatatttcaaaagtctgcataaaattcgaggaaagctccatttctaaaattaaaaaacgaaattttatgatatacttgttaattgaaaaaatcagtttaatttatttgcttaacgagataatagaataactaagaaacttaaaaaccagtggaaggagaagtaggtggcacacatgctccataattgatattaaatttttgccagtattggattttaaaaactctttagaaaacaaaaaaagtggaaacttgaggagaagagatagctaatgaacaaatgagaatgggagcatgaacacgaaagcccctatctactaatctagtctagtttattaattagttacacctaatcgcctccatttctcattgtcatctcccaataatttcggtttctaaagtccatagcctatataactcatcctcacttggtccctaccctctctcaattcttttcatattaatcccctataatttcactgacatattcatgtttctagcacaataatatgttatagttaaacatttattgttagagtgtttagttgctatatagtgttaattttcaatataccagaaaagatttaaacgtttacaagtaaaaacttaaccagaaccagaaggtttatatatgcagggacaaataatgggggaagaagagaaattgaggcccatcttcgcagagtctgatcaagagatcatgtgatatatctatctttatggtcccctctgctcttatattattattcacctttttcacatcaatctaaaactgaatttatcactcactcacggattcactcaaagctacacataaattttaatttatagtgtataattgaatccagaatcaaacatatatatgtgcattgtttttgtcttttggctgttctttactttccatttataatgataacaaatcgatcaatatcccttgtcgaaattgtgatgtaacattcacatttgattaactgaataaaaatgaaaacaataaatatagattggtatatccttggagtcatacctaactatttttaaacaaatttaataaaagagaacattaatggacgaaaacacagaatctcacctaagttagtcctatattggtcagaggaacaatgtttggtttttttcataactactggatttaaatgtggtgccatgcaagtatcattaatgttgttttaacagtgtattgattgtatcaaacattagtcttgactcttgaactcgttcaatgagattgtttttatataaagaaaacgtacggagtcttttaaatagtatactttggtaaaaggatctcgaaaagattctcccagatgggagcttgaccttacggttaagtgggagtgaagtaggtcgaaagcgacccttgggactgtacggacgattttattagaattaccaaaataccccttaataattgacaattcctgcgacctgcgtgagtctccacttcaggtttgggatcgaagaagcggagaaaagagccaaagagtgcgaatgatatgattacaccatttgcatttcttttagatgtgtctaatgcagaagtcccaactttttcatatttggaaagtttctataattcaactcttattcttttttctctttttttttgtgtgtatacactatgaaccatcagatttgagcaaataattaatctgatctataacgaatggataataatacgtatgaaatttctacaaaatatttatggctattttttttttgtcaatgaatttgtggctaatatttatcaacctatatcgataacctatatattgaaaattatatcaacctatatattgttgagaaaataaagaacaaataaccttatcgatatatactacaaaagtaatgatcatatcttatgttccaaataaactgtaatcatacggagtacaaaaaagacatttaaaaaaaaaaacgtaatcatttgagccaaataaactgtaaacatgttaaatatacacacatgcctgtattttacgattatatatacatgtcgtgctaattagttttgttatttaattaataacatggaatataaaagtttgaatccgaatggcgagacatggatatcactaatacaaactactaaaattttaagtaattgtatagtacaaaaatagttttttttttcaaatactttttaagttttttttgcacgtaatgctttcataatttaatttcatcaaaaggaaaacatttccctgttacgtatggaaacaaggaaggatctgattacttaccctaatcgaatcaacggatccgatgcataccgcatggggcatacgcatagagagcttttaatttgtagattagtattattgactataaagataatcataattattggtcattagcaaacttagagttttaagacaccttaccctttaagtggagggaagagtcgtttttatgattttagcacagcttaaaattattgtttactattgtctaacaagacctatgctaagatttattaaaataattacccctaaaatgctcttgttaaggctccaccaaaatcaaaagaaaacaataaataagtttctgcttatataaaactctacaaatttctgatgttacgtatattgtatactcgttataagcaattaggcataatggaagacagggacgaaatgtggtgtacggtcaaatagtaaaattgtacaaaataagtttggtttgtggaaagtttgaaagttcaattattgcaagaggttgaaggtaaatacgacagttggaatcaaatgttatttgcttgactgggttatcaacctaagcaagaaatttggttcttaaaacaatctaaacatattggtttgattagtacttcttaatctttctgcaatgataagtagtgtactgttgataaccataaccttatagtagaagataggaccatgttggtatttttccacaacttttccttctctttttacaattcataacaaatgaatactgtcgattagttcaatatataaatataagtaatacaaatattcctatattcttgtaaaatgacgtggtgactatgactaaacaggtgattaagtatattatcaaatatatcaatggaatataacagtgattaagaagaataaacaaaattaaaagattttgtggaatggattccactaaaccactacgcaatttaaaaataaaaatacttaactaatgtatagttatttattcccatccatgcgttcatattcactttgaatgatcatattcgtaatcctatttatttattttactatttgaaccttttgtgtgtataaataatttcaactagagagaatatccgcagcagctcgttaaattagtcattgaattaaaaaaagatattcaaattttcacccaagaaaaacgaacgcaactaaaatgacgttcaaatttggcatcatctttaggtgtatattattgtgagagatatgcaagcatgaaatctcatgcaggataagaatcattgttaaatttattttaattccgttatatttatggtaatatcatcctattaccttttctaaaattatgtttcactctttagttcaacctttggtgatgaaattcgattctttcatatctcgtctccgctttgcaaggatttgtccgtacaataatcatatgcactattttaattatttttttgttgggtgggattcaaaaaagttttttttacccctctatcagctagttagagaagtgagactatatatgattccaatcaataatacatcacatctatatttcgtcttgtaacgcggccacataatcttcatcaacgaagcttgaatgttgtaatagtgtttcactatcaacaacacacatttgtaggccttatgtaattagcgagagaactctacagtctacactataactttgagtggaaataaatactcgtatatggtaacataaaaatactatgaacttatgattatacaaacttgtaagtaaaaaagagtggtaaggctatgtaatatcgtcgacgttttctaggtaaatcttaagctataaaaaagattttgaaacccaaatagtatcgagtgatagcattagtctcatcgggtggttacaagccaacattgattcgtgttgcaaattttattaaatacaagggtgtacacaaatcaaaacgcaataatatttttggatcatagtctttcttcactatcattgggaaaaataaaataaaataagaaaaatagcgatagaatttcctctgtaaatgagcaaaattggtaggacaagtcagcatttgacacgtgtcggtcatgaatacgactaaacagcgtggcaatttctcttactctgacgtgtccatgtggggaccactttctcctccgacacttcggcatggctttctcaactttttatcactcttcttcaccattctcatttactaagcgcgtgtctcccacctctatccgatttaattttttaaatttgacgtttcaaaagttccttctataaaagcaattaacgataattatatgaaatccgtaaacatgaatttttcaaataatttcgatttttgatttgctaagattaaaagcgcgtgaaagaaaaaaaagaatacagcatgaacaccagcgactcagaactgactcggcacgtggtaacataaaactcacacgcttcccaagacgctcgtcccataaagagtcatggctgtgaccttgtgcgagtgtgggtgtagccatagcctttgtgggtcctaaataaaaaaaacgatcaatggcataatgtgtaattaactcacattccacagtgttaaataaaaattaaatctgtaacggaaaaaacaatctatctgatgttacacaaaaaaaaaaaataacggaaaaaagaaaatgtggccggggtttaatagagaagccgacacgtttgcctgccacgatccagacacaagacgatgtgggtaacggcaccgtcaagtgctaacggcaacggggtcatcagtaaaaagggcaatttagggatatagagtaaagtcataagcttatttattactatcgtcttgatcggacggctgagatttgccctctcctttaaatgcaccgtacgttttttttttacataataaaatgtaattagttcataagcaattcccaaaacgccgcgtgacccttcgtttgcctttgaatacaatttgttttattttagcgcatttaatatatttgagtttcctttttagcgatgacatgataaaacaaaaaacaacaattttagaaaacatttaattaaatgaatagaaaaatagggagattcaactgaagttactgtgggtggaaatgacaggtctccaggatctgaactaagagaaagtctctctatattttgatatatagagagagataaagaaggagagagtgtgaatatatgtatgtgcatgatactgtgagacttcttcagtaaaggaagcagctttggtttgctgcggatcgggataaaaacggcgagaagtttgtgattgttgaagcaaaacaacacggaatctgaaaggaaaggagaagacaaaaaaaaaaaaagattttaagaggaagagagagagagatcggtttcgtggctgacggaaaaaaaaaggggagagatttagttttatccaacagtgcctgaattacgttctgcaatcaatacggacataaccgtccgttgtgtcctgtttataaagttttgctttttttattttctccattgatgggtcttttctttcttctctctctcgtgtttctttcatggggttaagactagtgtttaccgcgtgaaggtttttttttctttctattttctttcatttcctctccttctacttcttcttctccagttctcatctgggttcttcaatggcgagtgttgaaggtgatgatgatttcggaagttcttcgtcaagtgagtagtaaaaggctgagactttagaaagttttgtttttttttttgtttctaacagtgactctgtttggggttttactctgtagaatcaaaatcagctttgtaaagtttcgatttttttttctttcattttctcgggagacgagcttagaaagaaatagaaaaaaccccaactttcttatttttctcgtatagcttcaaagttcacatttttgttatagttttgccgcggaaatgtgactgttagggttttgttgttgtttgattttagggtcttatcaagatcaactatacacagagctatggaaagtttgtgcaggtccattagtggaagttcctcgtgctcaagagagagttttctacttccctcagggtcacatggaacaagtatatacccacccaaaaatcatctctttttaccccaatttttctttttccattctctttctaaattctgggtttttttgcagcttgtggcgtcaactaatcaaggaatcaattcagaagaaatacctgtttttgatcttcctccaaagatactttgtcgagttcttgatgtcactttaaaggtaaagttggatcataaatgttaaaatgttttatttcccctgaatctgttaactaaattttgatttataggcggagcatgaaacagatgaggtttacgctcagatcacattacaaccagaggaagatgtaagttcttaaaaaaaaaactcaactttatttcagtgagtgttaatttatattgattggaattgatttcaatttactgttttgtttgcagcaaagtgaaccaacaagtcttgatccacctattgttggaccaactaagcaagagtttcattcgtttgttaagattttaacggcttcagatacaagcactcatggtggattctctgttcttcgtaaacacgccactgaatgcttgccttctttggtaaatatattcttaaagaaaccttctcaattcaagaaactttagcttgaattctcactccaattttacactttttaggatatgacacaagctactcctactcaagaacttgtgactagagatcttcatggctttgaatggaggtttaagcatatattcagaggtattgattctaatcttggtgtgtttttgtgaaactgtgtttggactaaatgagacattgactcattgagtgccgtttttggtttaggacaaccacggaggcatttgcttactacgggttggagtacatttgtatcctcgaaaagacttgtagctggagatgcttttgtgttcttgaggtacttttgaaattgaaactttattcactggtcttgtttagtttcatgaacctaaatgtaatgcctttgtgtttttcaggggtgagaatggggatttacgggttggagtgagacgattagctcggcatcaaagcacaatgcctacttcggttatttcaagtcagagcatgcatttgggagttcttgctacagcttctcatgctgtgcgtacaacaacaatctttgttgtcttttacaagcctaggtatatagtaatgttctttagatgattttgctttatatacatagatggtttaggactctttgattgaagaaaagttttctctctttgcaggataagccaattcatagttggggtgaacaagtatatggaagctataaagcatggattttctctcggtacccgattcagaatgaggtttgaaggagaagagtctcctgagagaatgtaagaatccattttctctgatcatttcttttttgtcagtgttcttgattctgaaacctggaacgtcttcagatttactggtacgattgtgggaagtggagatctatcttcacaatggccagcttctaaatggaggtcattgcaggttcagttaaccattccacgttcttacattttagtgttttacttattacgtggtctttatataacgtttttgtcttggtctttcttaggtacaatgggatgagccaacaacagttcagagaccagataaagtctcaccatgggagatagagcctttcttggcaacttccccaatttcaactcctgctcaacaaccacaatcgaaatgcaagcggtcaagacccatcgagccatcagttaaaacaccagccccacctagtttcttgtacagcctccctcagagccaagattccattaatgcatcccttaaactgtttcaagatccatcacttgagagaatttcaggtggatactcctcaaacaacagcttcaaacccgagactcctcctcctccaacgaattgtagctataggttgtttggatttgatctcacaagcaattctcctgctccaatccctcaagacaagcaaccgatggatacttgtggagctgccaagtgtcaagaacccatcactccaacctcaatgagtgagcagaagaagcaacaaacatcaagaagtcgaactaaagtaattttctttatcaactcatataataacatagcaacaatgttttgaaaatctgatttctttgatcttggattgaaaaaggtgcaaatgcaaggcattgcggttggtcgtgcggttgatttaacactgttgaaatcttacgatgaactgattgatgagcttgaggagatgtttgagattcaaggacagcttcttgcccgagacaaatggatcgttgtcttcactgatgatgaaggagatatgatgcttgctggtgatgatccgtggaagtaagttctaaaataacagagttaaacatttccggtttagctcaaatcagttaaatgtgaacttaaaccggaactgattttgcaatgttctgttgtgtgggattgtgcagtgagttttgcaagatggcaaagaagatatttatatattcgagcgatgaggttaagaaaatgacaacgaaactgaagatttcttcgtcgttagagaatgaggaatatggtaatgaatcattcgaaaatcgtagtagggggtgagagttttagctgttaattaaggttaattcggcgacgtcgttttagtgcgtaagtgtctaaagactttttttttagtctgtgtatataaagtcttgtcctctttttcatgtcaatttttcaagttggcgatttaatatttcggttttgggacagtggttgatggggcggttttacatcttttatgtgtatgtacttgttccataaccattcaattttcaaaaccaagtacattcaattagttatgggttcaaagattatatttctaatcaataattaaggcttaaaaaaaaaaaaactacagtattagagaagaatacaaaatacgtgaaggcgtggaaatcaacgcggcgggcatcatatgaaagtcatggaaaagtaaaggagtcaaacgactagttaagattctcttttggagttggtaaaaatatttgtggattaatgaacttctaggatatagtgttattagaaaattgaactgaaatcgaaaaaaatgaaaactaaactttggaagttcatgttatcgtgccaaaaataagtctccatgatgttctctataaaaattcttaagttttaatttccaaaccttttagctgcatcagatttttctttaataaaatgcaaatgacaaaagaaagaaaatctattttgttttcggataaagtcacatatgaagtgtatactgtagttgatatttgtcaaaaaaaaaaatattgttttaaacttttaattcagatttgccttataatgaagaagaaaacaatacaattattttcaaacttagtattggtttggtggtggttatgtacttatgtagtatggagcaactgttttttttttgctaaagattaattgtttttggtatggagaaattgttttactttgacaaaaaccaaaaaagcctcaagctaactaaactgaatagattttggagctgtagtatagaaaaaaaaaaaaaacatttttctgtttggataaaagatttgtaaaaacatttctacctttataaatgatataaagtttcagtccgaacaaatcatacaaaacgaacatccataggaccatcatactcaaagtatgagctacaaatatcgtactccattaatataaaatcaaacaaaacttaaattttcatacatatactaagaaattaataggtgacagaaaacaaaattaaacacgatcgtagttttagttgtagtcgaattaaatctgactaattttcctcaaccaaagagtacgggtttgactttcagttcgaggaatggttatagttaaacagcgttgcatcttcaatgacaattacatatatttaatccattgtcttcttcttcaaacgaatcataataagcagaaacaagaaagagatatggttaaaacccaaaaaaagaacaagaaagatacaagttttgacgcagacgataatgagacgatgataatcatcacatcgaaacttcaacatgtattagccgcgaaatcgagaaggctacaatacttatcatcaccggtaacgactaaagacgtgtcattgtcactcatgtcgtcccctgatgattcactctctcgcgcttcgattcctttctcatgggaagaagaacctggcaagcctaaacaccatgttcgtcatccttcttactccaagtgtcttgatttgccaccgaggatgctctttcctgacgaatttaccaaaatgcctcggacagcgaatcatggtcgttatctcgccgggtggaaacggtggttccggtggaagaaagagagagatggtgatgcttatgtggccggaagtggaagttatatttatccatcggaagatgaagatgataccaagaccacaagaacaaaaggtctccattgtttctcttacgtcactaggtgttacttctgggtaaattaaccttaaacttcattctatttctttaaaaaaaaaattctcttgtcttgtcagaaagaacatgtttgtatcttcttttgttttgcacgaagttccatggaagaacaagaagctgaaaatgaaagcttctgtgagagctttttaaaaaaataatacaaaacaatacgccgtcgtttacttgtatggaccatacttactcaattatgggcttttcttagtctatatactggcccaacaccttaataattgtcaaattattttatgatgctcgagctggattcgaatgtatagaagataggatgttgcgaaaaggcaatgtgggccagtaaaatggacaaataatgcataagatgtgatcttccatatgcgataatcattacatcaaatggtcctgcgaattattttttgtataaaaaaaattaaaaaagtttcgaattc

SEQ ID NO: 117 - DNA, 80019 bp, Arabidopsis thaliana
gaattcgccagacacaaaaaacctgttagaggtaaaccactctcaccaccctttacaccctcttaagctccacataggtcaaccaccagactattctgatggtaaatgtcgtctttgcgcacaaaagattaaagagaaattgttttatcattgttccgcttgtaacttcagcttggatatggattgtcttttaaacccaccaccacagtctattttggatttgaaagctcatgctcaccaactcatctttcgcccaagacttgattcttttacatgtaatgcttgtgggttaaatggagatcgaagcccttacatatgtgttcaatgtgatttcatgatacatcaagagtgtttttcccttccacgcctcataaacatcaatcggcatgatcatcgtgttgctcgcacatctgttcttggtgttgtgaattctgtatgtggagtttgtcaccaaaaggtggattggacctggggcgggtattcttgccagaggtgtcctcaatatgtcattcattcgaaatgtgctactagaaatgatgtgtggaacgggaaagaactcgaaggagtccctgaagagatagaagatataaagccatacgtggtaatatatggcaacataatacaacatttcagccacaaagagcactaccttagattccatgttaatggctttttccgggatggaaacaagcggtgcagtgcttgcacctaccccattggtctccaatccttctatgaatgtattgattgtgattttatgcttcaccaaaactgtgctgaatttcctcgaaagaaatggcatatgctacacaatgatcgacttacattagttacaagcgtagccgaattcttttggtgtatagcttgtagaagaatgtccaatggtttcaagtaccagtgtgggtatggggtgttagatgttctgtgctgttcagtttcggagccgtttgtccatccaagccaccctgatcatcctttgtattacattcgacaagtgaaatatagacaatgctatggttgcaacggtcgaacgtataatgtgctgacgtgcattgaaagttgttgtggatttgtcttatgcttctgttgtgccacattaccacaagtggtaatgcatagagtagacgatcatcctctctcactatgctatggcgaaaaggcaagtggcaaatactggtgtgacatttgtgagaaagaattgaatccaagtacatggttctacacatctaaagatcaccgagctagtttgcatacaaagtgcgtgttaggagactttgcagggctcatgccaagaagcacaataaagtatggcagcagatcatatgaggtggtgctcaataatagtgtatctcgtccattttgcagggtgtgtgagtcgcattgcatgtaccctatcagcttgaagatgcttggaacctctgatccatatatttgctctttaaactgccaaaagcgtctcaactctctggacaacttgacgaaaaaggtgatgatagatcgttaaactttcattttagaatacaattattcttcaataaaaggtttatttcactatgagttgctctccttaatgtatcactagaaattttaatggcatgatttcaaccttcatatgataagttatctagaacgtacatttggaataagattttgtaaagtcttcaaagattttgaacatgtccacccactgaattttaaggttacagacttgttatgttacatattgttttttggtagaacttgttatgttagtatgttacacatatgtagagacatattatcttcccttttttcttaatttcatttccttaatttcacttgcatatatgtcatatcagatctcttatgaatgttgttaccatagtaagcaaatattagtgagtataaacgactaaagagtgagtcttttttttttttactgggattcagctggaggctctatatgttttgaaaacaacaaagaaggagtctgatgatgacgatcgaacgcaggtattttcatttcactggcatatgtgtcattcagagctcttatgaatgttgttgctctgtttcatagtaagcaaatattagtgagtataaacgactaaagagtgagtttttttcttctgggattcagctgcaggctctattacttgccgaggaaacagcaaagaaggagcctgattatgcggatcgaatgcaggtattctaatttctgaacattgaaattagtttgttggattgcaattagggaatgtctatgactatgtcgtgtgtatgttctggatgcagttgcattttgtgcctttagtaagctgctcgatatgcaaacgtttggaagttgtcgtgaacgatatcagccaaactgggcatggagatcgctataaggtttttcttcttttccttaataagcaagataaatacaattaactaaacggacataagaaagagatggtactagtgtgtatatataagccatggacatcttatagattgtaacatcatgatcttcttctcttaggggggaaataaataaatcctaataatcacattttgattttgtttctgcatctagctggtgtgtatgtactgtaaatattgctgctatgcctcaacgaataaggtactaactctgaaaagacacatatatggaggatttgaagaccaacgactcgaaccctgacaacaatcctgaagcctccaagaaacaagagtaaaggggttccaacttttaactttatgtttagagttacgagtctgaattcgtcgaacttggtttcacatttaaaagttgattaaccttatgacaacaaaaataagactttggtcatgggcatatatcaattgtctctctctcttatagaacttattttgatgcaccatctttatcaatcattgtctttttgtctttgcaacattcatatctctaagtttgtcgaccatacattacctaagattccatgttaatggtcttatctcagaggaaaacaattaaacaagcgttgcagtgcttgcacccactccattcatctccaatcattctatggatgtatcgattgtgattttattcttcaccaaaactgcgctgaatctcctagaaagaaatggcattttctacataatgaacgtcttactttagttacaagcaaggatgattactttcactgcactgcatgtgatagactcttttccaatggtttcaaataccagtaaggggatatgaagttagatgtaatgtgcggttcaatttttgaaccgtttgtcgatccaagccatccctatcatgaatcaatgatgctatcggtggacaaggccggaaactcgagaaaattatgaataatatactgaaataaaacatgaaaattgctttacttacactatttttttgttcttaaaacctaatattagcttcttatttttttccaatttatattttgttggttgtccgtgtctcaaaacaagtgcattttggtactaaattttcagaatttggaaattaccaataataaattatgtgggatattaaataattagagaaataaaatgtaatactttaaaaaactattcgtcaaagtgcgccgtagaggatacaaatgcaaaaagtcaatagaagatgcatgatgtagtaaaaatgtggacataacataccaaaaaaaaaaaatgttgacatgattgacatttaaaattttattttaaaagaggcacgcagacaataaataaaataaacttttaagagaacctcgcagctgcacaaagaaatgttgattagttttttttatataaaaaattattgtaaattagctagagaataagttcattacagatataaattaaaaagatttctgaagatgtgggttttagataaatcaaattaaatttaaacgaaattgtatatgtatatacatgtttcccaaatgtgaactgcaaaactagtgaggggcatgaactaattataagacaacgaacaagtaaaaaaatttgtaattataaatctcttaccaaaagtatatgaatggcacatttcatgatgaacatggtagtatggtacttatggaaaacaaatcactagagaacttgaatgttttatatttcagcattattgttaaacacacagatgaatcaaattaagtccggtgtatatttcagcatattataatatgatttagcaaaaactaaatttgagatttcaaagagaaaggggaatcatagtatacgcggtttggcatatatcgaaacgatgccatgttttaggtctattaattcaaaaatttggtgagtgaaatatgcgaagactacactcaacactcatcctggaaggattagttaggtggtattcgtaaaactttggatcacctctgatgatctgagaacaagaagctgagaaaaattaaagttattacatggttgatactaaagtatataaaaaatatatatatatagtagatattaatatagatatctaaaaacaatttggatggacatatatgtcgacatgcaaaattaacgtggcgaggagtttattgagtaagcttggttctacacttctacttcctcattagcaaaaaagtcaacaatactttacgtatataaatactctcttcttctagttataagctgtgaccaaaacagttttaaatacatattttctcttttgaattgtaagaagaacaacatatggcaaagactcaaaactttgtttgcttcaccgccgtcttgctcatcctcattttggtctcgaccggtaatttggtcgaataagtcttttcattctatccatatctaaatgtcatcatatatattggtatatacatacgtttttccctaatgctaataattgttcaattttgatatagagataccaatgattgagggaaaaacatgtaagctttttagaggagaatgtcccgtggatccgtgcgaacctgaaaaatgtgatgagtgttgcaaggcaacgtttgggaaacaaatttgtggaaaatgcgaacaagagagcactgaattacattgtcattgtcgccgctaagcacttgatcataatctttgacaaacaagcctcttatgtactaaatgagaaatgatgcgactttaactcatttcttgttatctttgtttttctttttattttggtgtgttgattttgattcatttcgtgtggtatttccctttttttgtttttccattgtgtgtaaacgtataacgtattcatattgcgtgctccataataattatgtacgttcaatatgattttattggatgtgtgtttgagaataaacttaaacgaataatcattatttgcgaaaaaacaaataataataataaacagaaaacaaaagttgatcatgttttattagttcataagttttttagttgcgcaagaagtgttcttgtaaaacactagttgatgaaatgtatatactaaattctccctaatacactatacatatagtaacatatccattccactatatcatatatagtgttacttgtcaacactaatatatttatggttttcgagtttacacgcatattaattttagaaagaaggaaggtttcacagtaataaaaatgaagtaattatctatttttgtaaactaaacttcagtaattgttcatttatgcaaatcttttttctctatcatgcatgtaatcggaagcagatacttaaaaacgatctaaaataaacgtagaaagtgggtaacgtgtgttcgatacaagttatgtatatatatattgtaagagaagaatttacagttaacatcatgacgttcaaaatcaaagttttagactatcatcttcatttacaatatactttttgatcaaaaccatatttgaaaacaaaatattgtttgaaacaacacattcactaaaatattaagcaacttaataaaaataaacatcataacgttcaaaatcaaaggtttagactatcatcttcattttcattttcataatcagttccatctgatctaggttacgtttgtagtgattagaaaaaaaaccgtgcataacgttattcacgtttgtagttaacagatattttcatcaaattaaatatttttttaagtgtttcgcaattatttctttattacattttaagtaaaatgcaagattttgtcgcgtttccgtgatacaattggaaatttctaaagtatttccaaataagttttttatataagaaacattttatgcaactaatatttttataattgtttttgctttaaatgcgtactaattttggaaagaaagatagtttcacatgaattaaaatggaatactaaaaaccccgtcttaaccgtaaaagacggtttaaaatatatagacggttcacgaattatatttttaaactgcttgtacgtattcgtttttaattccatgcaagatatagtaaagaaatttggtatacatgaactattttaaaattttggtttcagaaatagatagtttaaaacttcatatatgatttttgatcgcaagcaaaagaattattttgttaacaatcatatttctgaaagttttaaactatctatttctgaaaccaaaatttaaaaacagttcatttataccaaatttatttctttcctctatcttgcatggaataaaaaagggatatgtacaagcaattaaaaaatataaactgggaaccgtgtatatatatatatatatatatttgggtaatattagaaactaactatagaattgaaaagaataaagtaactaaccattgtcagtttttctatggataaataactatataacggcataagaaaatacaaaactatccttgcaagttgaaccaaaagcaagcttatgtagatatatttgatgttttttagtaaatcgcatgaaacatgttaaaatagcacgatatttataaaaacgatgatattttataacgtacattttacacaaatagcatgttatataaacaaatatcgtttcgtttgaaaagttgaaccatgagcaagcttacacgaagataaaataatagatttgagaaagttttaacatttaaatcatgtttttagaagaaattacatgtgattttaataaataatgtgttatatgaaaaagtagcatgttgagagagagagatttctagttatcacgtgtaattcgaaaaagtagcgtggtataaaagaaaataacatacaatttaaaaagaaaacataacgacggagattccaagaaataatcaaaatcaaataaaaaaatgacaaatcttctgcaaattgaaggagagatgatctatcaatataaataacgtttggcagcctagatttatcgaaaaagagatcaggtggttgtgatggtggaagatgtggtagttgtggtggtggaagaaagaaagatgagatgattctaagtgttttatatgattttgaaaaatagcatgtaatatatatatataatacgaaaatgggtaaaaaggtaattgcaagtgaagaaagagagtgtgctctgacaccatggctattttgttagttcttttacaatccatagtcatctagtgcatattctctatattaaaccgtcttttatgtttaaaagagtttttttaagtatttcattttaactaatgtgaaactctccttctttccaaaattagaccaccttcttcatttttatttgctattttcttcatctacgtaactatcgtcaacggcatccgtattctctgttagaacatgaaataaaataaataagatttacgcttcttgactacaaacttattgagttacttttttagcaaaaaaaatctctttactcatctaaaaacacaacacccgattgaaacatatcttaacctcagaagagactaattctacatcttttatacctttactttctccaggatcaaaaaattcaatacaatcacgtgtatccagcatcaacgattcataaacataactcgaaaaccacttacttagatcgttctatctaggttacgtttgtgccgatttggaaacaaatttaatgattgatattcatccagctaaagtaaagagattctgttacaaaatacaaactatacttattttttaaaattatttatcaactacgattccaaataaaattcaagaatctgtaatttcaggtttgaaaataagccttgaggaatcgacattgtatatggttgggttaagagatatagacaaggaggaaattctaaactcttttccttttgaatctgtttgtcttcccatccgttatcttagtttcccgctgctaactaggaaatgacgaggaatgactacactccacttctaaatacaaagaaggctaaggtcgcgtggagttgacgtttgtacaacaaaagctgaaggtggtctaggcttgcgatcattaaaggaagcgaaaataaggttagttatctaaaactgttcatttggagaatactgtcagccaattctctttggatacaatggttgcggctctatgtactacgaaagggttcttctttatcaattcaagagacttcaacactacgttcgtggatggatgtggaaaaagcttctcaaatattgtggtttagcttctgattttgtgaggtataaggtgcaaaatggaaagagcattttattttggtatgataattggtttccacttgatcaattaattgagatcaccggttagagaggttgtatagacatggggcttggcattcgagctacggtgcctgaagcgttagcgtcccatagacgagcgtcataggactactcacttaaatcgactggagatcgacaatgctagaagaattttgccataaagggctgctagaaattgaagatatagtgctttggaaagaaaaaaggagatcagtttaaagtagattttagcacaaagggaacttgagagacaacacgcatgtcaaagccaaagatggaatgatacaaaggttttatagttttcacacgccacgcctaaatactctttcttcgcttggcttgtaatacacaatcatttatcgacgggagatagaatgttacgcttgaatgtcggtgtaaactcttggaaactcgaaaccacttgttctgcatgtgtcgctattcaatggaggtattgtttggactcactaccaagctcctttccacgcgattcacaacagtttggcatcatgtcctcaagctcctcatggataattccttgggacatatgatcgactatttctaatgaggtatacgtttcagctttcaattcatttgttgtgggaagaaaaaaacagcagaagacatggtgaaactccaattccatcaaacaaactagtccaacgactagataagcaaattcataacatgatatcgtctattcaagagcaaggagatagaagatatgaaagatgtatgacgacttggtttgcatcaagataaaaatgacgttttaagtaaactctttgtgtaaatgtatcttaaaatcatctaaacaactattgcacttgttgtaaaatattttttttttgaataaattttacattttatactttcaaaaaaaagtttcataaaattactttctacatctttcccgtgtttccaattttccacaaagcattcttgaagctctttcgaaacataaaacagatttcgaacagagtttctaagagcaaacaaaatacatatgcttatttccgttacacattttctttggggcataaatctaataacctttaaacatttacaaccaaatcaaaactatatctaaaagaaatagaagaataaatagttggaaaacacaaattcaacacataaatattaaataacttgtttagaccaccatcttcattctcatttttatcaattccatataaatcacgtttttgtaattagaagaaaaaaacatgaatgactgctattcatcaaactacagtaaatagattcttaagttataaaataccaaatcaaattcaagattccgtagtgtttcagaaatgaaaatcgaatactttatgtagtgtgtccaaattacgtttgataaaaaattggatctcggactaagttttcatgactaaaatacatatatctagccttattactgtacacattttctttgggggtaaggatctagtaacctcaaaacattttctcaagaagatgaattatttctacaaaattacaaaatatttatttcctactaatacatatgcctttgcattaatggatatttgactaagttgtaaaagagtgattttctttttttatgtttcaaagctgttttatttgaaaaataaagtttaaactttaaaattcaatgtttcattagaaggacaactaatatttagcttaatttagttggctggatactaattcttatcccctttacaacccaaatcctaaatattgaccaaaataataccaaaaaatgggatttacacataattacatgataagaaagttgaaaacattaaataattttcaaccctcaaaacatagaaaaaaatcttgtccattttatatacaatttcctacttgataccattttgagaaaccctagattaagcaatctcaatctcaatcaccaccactcgacctctatataaacataaacctagcaatgtatttttatcatatctcagattaagttttctcttttatctttttataacccaaatcttaatattaaccccagattaagatttgttacaaaaccaaataaacaaaaacagacaatggttcaagtgcttgcatgtcttttccattgatctcaaaaaaaaattgtgcctttttgtcagtatttattttgtcacttctgtaacaacaatggcggagtttaaacccataaggtggcttctttaaaaacatatccttttcgcgtctgcaacagaaatctccaggtaaaaccaattgagcaacaacaattcgataaaaaaatcagactttaaaaatccaacctttaggctaatccatgtttgtttgtttgacccatttcttgaaattaactctaattgtatttgtttggcttaggttattgaaagaagagacctttcttgattagagcaatgaaattgaggtaaagggtttaatggcaggatgggaagttttaatgatacttcatgttcatatgttgatgttgagattaagtatgttgatgaatgtgaggagaggttaaggagattgtttgatcaagctttgttggtttttcttgaggaagagggtagtataaagcctctccctgcagttataggtgatggcaaaaatgttgatttgtttaagctgtttgtattggtgagggagagggaagggtttgatactgtgtctaggaaaaggttgtgggaagtagtggctgagaagttaggctttgattgttcactggttccttctttgatattgatttacttgaagtatttgaaccggatggagaaatgggcggtggaggaatctaggattgtgaattgggataataaggatagtgaaaagaaagggtgttatagtggtatgttgcatgagttagggaatggttttaagagtttgttggacaatgggaagtgtcagaaacgtaacagagctgttgcgtttggttgtaaccatatggaagagtcgtgttcagagtttgataggtctaggaagaggtttagagagagtgatgatgatgataaaggagtaggactgtctagtgttgttattagggaggagactgttgtatgtgctgtggaagaaggtttgtcggatttttccttggagaagcgagacgatttaccgggaatgttgaagtggctggctttggttgcaacatctcctcatgatcctgccattggagttataccgcatagttcaaaatggaagcagtataacggtaacaagtgttggctccaagtggctagagcaaaaaactctttgctggttcaaagagacaatgctgaactcagatatagatatcatccatttcgggtaatgccttgagaacagctttattataatctttctttctatctaagtatgctttctttttctacctgtgagacagtttaactcatggtaaactcatgcagggtcaccaaaatatacatcatccgtctatgtatgaagatgatcgaaagtcgatagggaggttaagatacagcataagacctccaaatttatccaaacactgttcgagctcgtgttgcaatggaagcagtttggtctctctatctaaatcaagatctaccaaatgcagaaaactgacgatcattgcttctgagagagcaggccttactgcaggaacatctagagccagaaagcgaaacaaagcagagatcccgagaaggtgtattaaagtaggacatcaacaccaagcccaagtggatgaatggacagagtccggtgtagatagcgatagtaaatggttaggaacccgtatatggccgccagaaaatagtgaagctttagatcagacgcttggaaatgatttagttggaaaaggaaggccagattcttgcagctgtgagctctctggttttgtggaatgcactaggttgcacattgcagagaagagaatggaactgaaacgtgagctcggcgatgactttttccattggagattcaatcaaatgggagaagaagtgtgtctaagatggacagaagaagaagagaagaggtttaaagacatgatcatcgcggatcctcaatctttctggacaaatgcggcaaaaaatttcccaaagaagaagagagaggagcttgtgagttactacttcaacgtcttcttgattaacagaagacggtatcagaaccgtgtgactccaaaaagtatagacagtgatgacgaaggagcgtttggtagtgttggtggcagttttggtcgtgatgctgttacttcgtctggttcagatgttatgatctgtgctcagaatcgtcagtgtgaggactactgagtgaagaagcagaagattgtaacaaaaggaaaatgtgttgtataaggtttaactcaaaaaacttctttggaagatagaagtataggagtttcagtttgtagcttttttcttttgtaaacttttggaatttttaaaagttccaaaaaagttaaattttttaatactacatttctttctttattaaactttgaaaaagttaacttttagtagatttctttattttacactcctaatttctaagagtcacatacatccgagaagaaaagaaaaagagtcaaagtacattttaatttaatttctatctctttttccaaaatattctccatcgtaataaattagttgttgcacgaaactttgtcctttttttttctgaaaataatgggattttttttggtaaaagagtaaaaaatgttctttcacaaagatgaattttctagaaaaaaattttgtcccttaaaaataaaagttttatattttcaatgcaaattttaaaactgtttacctgttttacccttattaaataattagatatatttattattatttttaaactatatttaaaggttaaaattgatattatatattatttgttaaagaatgtgaaattttaaaaaaaatcatctcagtggtatggagaaaatagtttttatctgtaaaagacaaaagcagaaactgaaaagatatttaattcattagtagtagttctagggtcggagtctcaccctatccaaatgttatcttcttatgattttcgaaataaccatttggatatatgctctatgttgcaatatgtaagatatttaaggttgtcttcctcttcttcttctctacaagtcaaagctaccttacttgttggtttggtaactttggtttaattcatatgtgactttgtgctacccatcagtcatggtttcatttctctggcttcatccgacgttcgttttcaagactctccaaactcgttaatctacgtacctaagattatacatgctttgaatttaagtttttaagaggtaaagtcagataattaaatgaaacagcattaaaacaacgtctaaatttcttcagtcaatagaattaacccaatacattaaatatgcattaacttacatcgaaaacacaaacaagaaaaaccctataaaaataggcatggttatggcctatcgtatgaaatcaagtcccgaatgttttatcgataaaactcaatttttttttttaaagttatggagatgaagacgcttctcaaagttatgttcttcttgttctcttacttaagtacgttttcattggcaatggtaccatatcgtggttgtgacgttattggagtagatttgggagatggatcgggcaattacgggaagggagtgtccaagggttttttgtcgggtcgtaagttagtttctggtccgagtcgtagttcttgtggtcactaaccgtcagtaaagtaagtttagtaataataagaactttattatgttagttctcttcatgattattattatgtctctgctgcctttagacctatgaatattgtaatgagttttaacgatgtgcttaatgaaatgaatggcttgcaacttttgttgaatgtttttatttgtagtttgaaccttaaatccttgagaaactcaaagggttgtcactgcctctaattatccttaataatttttcattttatatgacatctctcttaaaatcctaggttagagactcgcattgtgcagcgtggaggaacatttgttaaatttttcatgcagtattttacatatttgtgatatgatataaaataaatacctttttgataaaaaaaaattagatgatgttgatatatggtgtatatatagtatgatataatactatatatatatatatatcatactatatatatatgtatattttttataacaatgttttttattctattatcgatagttgggtttgatactaatatccgcgtcttcactccatatgtatcacaccaaccacaaagaaagaatactcttggtttttacatcgagaatagataagaatcgggtatcagtgccaatttttcgttaaccaccaatcttgttaacctcatcgttgctcatatattacatgatccctaaacaactagattagtacattaccaatagtacttgatgataataaaaaaagacaactatataattatataaaacaatgtacatctgtaatatttaatcggtaagttttctttttttggggtgtaatgtaaagatttatatcaaatataaaaagtttacatttaacaatgaaacccaaaaaacacacttatgactttaagatcacaacacacctatatcgctaacttcaaaacggaaaccctacatctctttctatattctaaataagtctttctccaagcaaagttttttttttgtttttttatcatttaacacttgttgtgatcagtgagaagtgttccggtaatcacttttgaggaaaataatgagtaggaaagtcatgttcctcattgttccttaatttgtttttaccattttacaagaaatttttgttccattttcagacatgtgggtcctgacatttttcctcatcattcctcacacgaaaagaatggtagaacagaatggttcctccccaaaattgtagaggaactaagaggaacaaaaaaataaaattcgtttttattaatgaaataatttaaaaatagcttttatgataatatttatatttctatatataagtattttccatatttttagtatatattggtatatatttttttttaatcaaactttcaatttaaagaatgttatgaagttattataaattagtataaataaatgttttaaagtgaaattattttaaatttgtaatataatttaattttgcactataaataaatcaatgttttgaagagatatttataatatattttattttaaatttataaagaactttaattttaaatgaaattaataaacaaaattcaataaatgatcttttagtaattattatgttaaatattaattcaactttttggttaccatttaccataatcatttggttcaattcctatgttactcttggtttctacttatgactattttctgtttttcttgttccttttcattcatatttctattgttccttttttggtcaccaatggaagttttttttttttttgtatagtttatctatcaggaaatctaggagactaggattgtactttcatttgtattagatgagtacccgcacgtagtgcgggtttatgtattactatttacaaattgttttatataatgtctgttcatataaagtatagttgaatgcatcggttttgaaacataaatatgatttgtaattgtttttgaaaagttcaactatattagttcatctgaaaaacgaatgtgtttgagttgtttttattgttgttctagattctcagttttttttcatatatatatccttgttttttttgttatatgtttagattgtgagacggtgaaattttatttcttacactaaaaaatataacatgtctttattaaccatgtctctgcatatttaatctaatcatattcaatttgatgtttttggaaagtttagttaagttcttgtcataatcttatatcttacgtattagttataaggatagttcctcaaacatctttcaaattacttgttttcttagcctaaatttcaaaaaacttagatatatttaatttgcatattcatttagtttctttcataataaacgtctaatttttaggcaaggaatatgtgtagcatgtttggattttatgatcactttagccactaatggatctcaaaattaaaaagaatatattgaattgaaaaaatgtagaaagaatgatggattaagttctgactaattataccctcatattttacttgttatgttgaattaattactaattatgtattagttattttatgaagtctatgtggcaaacttcatgtgctgatgtgtcaagttgtgggagagagttagcgttctttcatatatatgatttgggtttatccgacaaaaaactattccgaaaatagtgtaatctcaatagaaccttccttaaccaacctccaaatgtataatgcgtctactgaccgttagattaaatacaaattccgcgaaggataatcatttttgtattaataaaagtaaattgatttcttatcaaatggcccgtatagctcagtggtagagcgtcagtcttgtaaactgaaggtccgtagttcgatcctgcgtgtgggcactttttgtcattttgtacaaaaaaattactcttgagccaatgaggctattgtgcaatagtttgccacaagaacagagacattggcctatgtggtcagtgttccaagactccaaaccatgtgcaatgaaaaaaatcccttaacccggaacctctggtttatgatatcacattacaacaatcctacgatttcaaaccaaacttagaatacataaaaaaaagggtcgattgataatgaaaaaaaaatcgaactttatattcataagaattttgttactaaaccatatctctttatctgtaagagtgtaagactgtaacttcgaaaaagtatctatgattcttcttcaccagttagcctcaagctaaactcccatagttttttggccagatctttgtctttaccctgagaattagggtcagatatgttgttgtccatcaagtattctccactcactccttttgcctgaggatgaagcgcagcataacaggtagttgccgctccctgcaattaccgtatcaaaaaacacagatacaaacatttgtatgtgtgagttgagacagaatgattaagttggaagcaaattagatgaaaaaattaagaaacctgacctgtggaatgctcttcagcacatacttccccaccgcattaccaattgctgcgtcaaacaagagaaagaaattcatgccgttatcggttggttctctgatgcatctattgttagatcataaacattcattgacaagcttactagttactacggaacaacattttgaaaatgtgtagattaacacagggttaaacttatactagttaattataatacaggatcaaacatcacctaggatatgagtcacagtgcaggctcaaactaaattttacaaggcgacacaagttaatccgttgtttatcgagtgtcagtccagtatgcagtattaaataaacaaaggaaagtcagaaatgatatataaggcgaaagaggatttactatttatgaagctgtggtagcgtaaaagattggtcataatggatccaggatgaagtgaattagcagtgatattcacaccttgttcctgttttaagcaaaacaaagatgaaccaaacctaactcctctagctttctctttgacctttggaattgactacgaatcaactgcgaaatactatcttaccttgaatagcctagcgagctcagtagcgtgcaagatgttaccgagctttgactgaccatatgcttgcaaagtattgtacctgtagagaaacagtgagagcaatagcagtatgttattagtttactacactagaactcaaaagtaataaacaatactatcacataacaatcaccttgcttcatcatttattttgtcaaactgaacaccttcccggtaagcaaatcgatgaccttctgatgagacaataacaattcttccttctctattgctttcactagctgttttcttcatcctctccaaaagaaggtttgtcaacagaaaatgacctgaagcattgtacaaaacataaaccttataacatagaaaatgttcctcatcatacttcaaacgatgaagcaaaagttcaaacaaagaagcaaaaagggaggagatcataagttcttctaaactaaacatacccaaatgattggttgcaaactgtaattcaatgttgtcgctagaaagcaagaagggacatgccataatccccgcattattgctacaaaaacaagaacaaagattaagccgactaacacatattaacattcactaatccagcaattactgaaacaaactacaaacttagagagactttacatgagaagattcaagggaaggtccaaagactgatactctgatgcaaagctcctgacagaagccatagagctaagatccaacttcattacatcaatcttagcctgaggtatttccttaagtatcttatctctgacttgattaccagaatctgtattccttaccgccattacaacatgaacaccacgaagagcaagaacacgagtagtctcttccccaataccacttgatgctcctgaaatcaaataaaacatatacatcaaaaaccagcaaaatcttctcctttgcttcaagatgtgttcttaacaagcctgataaagtttaatcctttagtccattaacagataccaacaacaacttgagttcaagggcaggatcaaaaccaagaaattaaactatagactgaacatagatcataaaaaagttgaaaacatctgcacgaagaagaagaagaagaagaagaagaagaagaagaagaggacctgtgacgatagcagtgagaccagtaccatcgattccatgagtgacttcttcagctgtggaacgagcagagaacccagatgctcctttccaccaaaaaggccacatgtttgttttgtttctatcttctgtaccacaaaattaaagtctaatctcaaccaaaccaacgctagctgatgatcaaacacacaccctagtaaagttgaccaattataaaatttctttttccgagagcttttgcaatgtgcccatgctctgttctcaaaacaaggcactgaagaatctcgtataaaagtattaattacagtttcatttgttttcttccttaatccagagataagaataaagatgtttgtatacactatttacatttttgatacaaatgttgttaaatgtgaaatttggtattcgtttattgttcttcataaactaataataagcaattaacaaaaagtttgcttgaaagagaagctgatcaatgtcaaaggtttttacagcagaaagttggaaataaattggacaaacaaagaaagatccaaccgaagaaggaaataacaactctctctgggtgtgtagagcaaaaaacgagtctaacatgttttaaaatctttcataaaaacttataaaagatgagcaatcttcaaaagaagaagagacaggtttgggctaaagaagagtgctgtgatgttgaaaatccagagataacctttttcattcattcccatggagattgagaccaaaaaaattattattactcaacgctgtgttggcctgggcctggagcttccaaatgtggatcggcgatcatcactgcctctaggaccagaaccccaacggtctcctccttcagctggaggtccagatctttccctattactagtccaccggtcagtattctgagcggctcctctgttgcttccccagtggtcatctccgggaggcggcccacggttggaccgtcggtcagtttctgatgatgttggtgctgatgggcctgagacctcagtagtctggcgcttccacttcggaacataaggtgctgctggtgctcctgctgctgctgctgctgctgctggtgcggtagttccaacaggagtaacagtaggctctgcaaggcgagcaggtggtgcattagttcctctcaacagctcttctcgttcccgcctacttttctcttccagctctatctctctctgcctttgcttctcaaaagctttatccaagtttgctttgcgttcagcttctaccttcttgagcctctcagcttctacattagaggaaaacccaaaaaataaacagaaacaaggggttattaagaaaaacttcaatatcaaagtcaaaatgatgtggatttatggaagcaagtccacaccttcctgcttgcgagcttcctcttcttcctgcagcttcctaatcctttcttcttcaattttcaaataatatatctgcttcctcttgatatccctttcttgcttcttctctcggattattttactgatacgctcctctctctccgtcctgattctgtcaaactctgcttgtcgacgactaatcacttgtgcttggaatatttcctgggcacagaaagattcgattataagtacattggaaggaaaagttacaggaaaaatgtaagaaactagagagctttaaaattaattcaataacgaaaagagattcagatcaaagatgaacattaagagaaacaacatgacatgtcaaagactgaccttattacccaacattctggacaacctgttcttctccttcaagtcactctcatgacgctctttactgagttcaacttcacgctgcataggagaagagcttttaagacctcatatacttccaacacagaaccaagttgtaagaaaagaaaaactactgaaacagtaagtacctgttgttcacgctcataaaactctctttcctctaccagtcttcgctgatatgcagcttcaatcaatggagcagcctcttctctctttgctctttccaaataatccatcgttttggcaagcttttgaagcttcttctccatttcttgcctttccttgagctgctcagttaaggccctttccttcacagattgctttgtcaccttctcctatatttagtttaacccaaccgacattagtaataagttaatcagtgaactatataatagctaacatattggtaaacttactccgtctaaaagtggcttcttctttccctttttcatgcgcttctctgtctcttccagtaaagcttgggcttcttcaagctccttctcctctatctctctaaggattctttgttttcttctctctgcaagctctgctgcaagtctcttttgttctgcctcttcagttagcttctgaagcttaagccgtttctgctcctcttcacgttccttcaaaagtaaacatcaaataaaggaattttcataaacaggtacagcgtaaaaggagagctgtgcaaataaccatggaaaagtaactaccatttctagttgctgacgctcttgatcctccttcctcttttcaatgattgatttacgagcaagcagtcttttgtgctctttctcaacagtatctgctaaatttggtataacgccagctagttttgatgctttacttgggacaggatacagcatagctcttactttgctcaaagactcggcaaaaacagccagatgatccctcagtccatcagactcaataccctaatatacaaacagttgatcaaatagattagtatttagtcaataagttaaaaattatattactcaactacatatgatataatcagtgttgagctgaagctttaacagaggcttaccaaatttccaaaaattacaacacccttcatgtgatcaactttcatggcaacaaaattgttcttcacagcatcaacagaaatcttctctacctctgagaattgaaagaagggtaccaactgagataaactctcaattcttattgtctgataaatcttagacacctgaaaataaaatcggaacatagaacatttagtatgcagaaaaagggataaaccaccagaaaaatccaaaatggttgaatgggtattgacctacaacatagagaacaaggcttacctgttgaagtagcctcagagtagcaagcttctccagagaaggaacatattgggaaagttgcacttctggtaaagaaggagctgaggacagtttcccaccagatttggaaatcttttccagcaaaggctgaatcttggagccaagatcaagtgggtgaaattcatgctccaaaacatggaaaagatctttgacctcctgagatgcacagctcaaaacaccttttgaaacctaattgcataaaaatcagcctccaaatcagatatttgtaagtcgacaaatattctaaaccacagacagggtaacagctagagactcaccagctctgacagaagagctgaccgggaaagctgaaacaggaaggaaatggaattagaatactaaaccagaaagaaagggcgcaaaataaaaatgaagcaacataagaacctatgttaccatatctttgccctcaaatttaggttcaagattgaatccaatgaggttagccatcctcaaattgcgttctttctcattttcaagttccatatgggatgcgctctgagcccgatcaaatggtggaatggacaatgccgccaagacaacagatgacgctattagctgcaaatccttttggcttaaattcttgttgaaatttttctgcagactaaacagcttaaaccatgcataagcatgataaagatggctagaagaaatccagaagatctcagtcaatttggaataataaaccatcaataaagatgacttgggcgtttttttgaccatgcacattaatccatagatatcttcaacagagcgaaaagcttcctgcaaagatacatcacgaaccatactaacttatttccagtaattatacagaggataagctatatacagccaaactaaatatggaatagagaaggtagcatcagaaaaatacacatagaaaacaaaaacgcacctgccaaagtccaagctcagtagcaactttcaactgatcaaaccttgtgtccagatacagctgcaagctctcaggggctgataagtcaggtcggtccctttggtctctgtacttgttcaggtttgccaaatgatttcttataatttcacaaagcctacggaactctgttgttcgcttgtactgcttacagaactggaaggctttatgtgctgtcatctacaagattataaagtacaagtcttcaatctcaatcaacttaaaatcagaggtatcaccaataagcttaacctagaagaaaacaaaccgcataaagtgcttccaactttgagttgtttcgcaatatctcaaggactgtcctgtatgtctcccacagaaacttaaaccatggggtgaccaactcacggtcagacctatcttttcccttctccccactgacaatacttagctgtaaatcctcaggcttcctatcagcttcaaggtcatcaacatcaagagcctcctcaagggcatccgcctgagaccgagcttgctcagctttgtcagtagcaagatgtaggaagtgcttgataacttcctccaaggaactgacattcacttgctggcaaacaatacgatactgaatcaatccatccttagcgaatcgacccctcttcaagtcaacacaaagatcaagatacttaaacatgatcttctcaagcggtttctgccaagctctgtatctcttggaagtaatgagatcatgaagcgcctgaagagcatcttgtttctgtccaacattgatcaattctacacacacaaaaaaaaagtgtttaacacaatctcaattcatacacaccctaaccacatccatttgaccaaatggatgttaaaacgaaaacatttcgtaacttaccatcagcacgcttcaacgcgttctctggtttggcaaaattcgccatgtttcagacgaaaaaagctagtaacaaactctaacgcaagggacactctcaattagcctgaaaaacacagagaagcgattttgttacagagatcaccagaatccgaaaaacccaatcagatatctcagaaaaggatggaagctacatagaccagaaaaaacttgcccaaaccctaaattcatttcatagaatcaaaataacacagaaagattcgataacctgacccaaaccctaacccagatcaattcaatgagatttgattaaaaggcagtagagatccaatcactgatgcaagaacagagccgaaacttaggactaaccttgtagccgtgaaaagagaagactgataagagagacgagaagcgaagcggaagcaactctagggtttctggtattaatattatcgttctacatatatattacccatatttgcagaaatcatcctattttcttacggtttcgaaatgaccccgttttatcttcttagtgtttataaaacccaatttgtctaatactgggatgtgattcaattgagatcaacaaaatttatggatttcattttcgaattatcatttacaatatactctctatattttgtttaataatatttttagcaattaactttgatatttctatattattaactaaacatacatttaagtaaatagccaacaacatattaaatattacataaaatgccactacaaaaattcatttcaaaaaaacaattgatttacataaaatcatgaaaggtaaaaaattcaactgtaaaagggtgttattggtttatgatttcaaaagagttttaatgacttaaagtgtaatatagaatctgatgttattcaattaaattttttttaaagtataattgtgttaacccgctttaatatttataattgggcaattataaattcatataaaaaaaattaattatgattattgcatttatataaaaaaattgaaaatttgaatatgattttttctattacaaatagggattgttagcttacttttaactgtttttttcttaattatactaggtaagtaacaagagtataagaacattatacagttcaaaatatatatttaagcaaggcattggaaatatgtgatggaaaattaatataacagattatttttgaattattttactatcgacgtattttttttgtcggaactgtcgctcacgatttgcaatagaacatagccatatgtaatcattttgatctatatttttgagttactccaagattcaaacaatttaaattccgttataatctacaattaaccttccatccaattccaaaatcaacaatattttagccaatttgtgcgatgatcatgaatttgttttgttaaattcattgattttctagaatccaacatgtacataaaaaaaattagtggaaattgatatatttttttgggaaatttgcagaaataactaacaaaaaaactataattcactaactaaccatcctaactatgtaattataatattctctgtattatatgtaatattactcaatttgcccttgttgcctcaataccttcagtagcaaccaccaccgctggccaccaccgccggccaccaccgccggtcaccaccgccggccaccaccggtcaccaccaccggtcaccaccgccggccatcactgcctgccaccaccgccggccaccactgcctgccaccaccgccggccatcaccgccaacttcggccaccatctattccggtcaccaccaacaccggtcaccgtcactgtcggccaccatcaaatccggccaccaccaactccggccaccaccaacttcggccaccaccaccaccgccaccaccactgtcggccatcaccaccaccggccaccaccaccaccgccggtcaccaccaccaccaccaccaccaccaccaccaccgccgaccatcaccccgccggtcaccaccaccaccgccggccaccaccaccaccgccggtcaccaccaccaccaccaccaccaccaccaccaccgccgaccatcaccccgccggtcaccaccaccaccaccggccaccaccaccaccggccaccaccaccaccgccggcaaccaccacaccgatcaccaacacttccgaccaccatcaactccatccaccaccgccggccacaaccatcaccaccactaccatctccaatcaaaaagactaatttagtaagtttactaccctctagtgttagtttctacattttgtatattatagtgttagtttcttaaataaattatcaaaaacagttagttttgcaattcacccatatttttttctcgtaaatgtttttttattgatcgaaagtctacggcacaaggtattcttacaagacaatattttaagagctaacaaaacgaatatatagtccacaaagatagacccaagattaaaccctccaaagaaagaaaagagacagcaaagcaaactatcttcatatcacaagacgcgtcagacggtaaagatgagattacgacacatgttgatttcacaacctccaccgcaagagatccaacttccgatgaattttagatcgtcaccggaaaactaagttcgagcaatcaaatcttctgtttctcaccgtaatgacaatcgcagatcaccatactgatttgctcacgactgattcttaaccaattgaatctctgattccttgacaacaacgacgaaaaggtaattcaagatctacacaacaactaaagcttttaattaggaacctaaagcacattcaaaccatgaactgttttaaccgagtaacatccgcttagagattaagccaataaagcttccaaccaacaactaaaaacataaaagaaagcaatcatcttcatagatcggtgggaagaaataaccacaattatgttgaactcaatccaaaggcactagaaaaaaccatcatccacaactccgatttgtttcttttaaaattgaaatcgataagcttgaaaaacaaaacgagccttttaatcaaaggaggtttaaggaattctaattccagatctaagaattgaaacacaagagggccaatcaaaccaaatgtaaagaaaactaaagaacgaaaagataaatttaaaccggaaaaaatccgattagaagctagacgagacacaatagaaggacgatgaaactctagatataagccagtcaaccgcctttgtaaaagccgacagatgccagacgctagccgaccaccaccgtaaagagaaacggacggtgtcaaaactaaagctggccaaacattgccataaaaacgaaagttatcggataaaaagccaaaaagtcaaaagccaaaagattctaaacggatagttggacaacggaactaccgttgccagagaaaaaactctaatgacttcctttctaaaaaaatataggagagggaagtccacccgattagtggaatttgattattgaacaaaaccagtttttccattttttcgcaattgtaacaaaaaaacaaaggtaaaaataaaaacgaaaaagtaaaacccttcgagaagaagaagcagcgcataaacccccatcggccagagaaaatgagcaatttgggatctcgatcttctaccgacaaagagcttatcagcttctcaaggttttggttaatttgagctacagatttttggattatcgatgatatctagcttcgagaaattttcgaattttctcacatgaggcgttattttggaacagatctttgttgagctattggctcgaactagttgactaagatttagaagtcgattttttgtgtatattgtgtaagataagcaaatgtcttcttctacgaaaggatctgttaagaagagttcgattaaacatagttgcaacttagctgaggttaagaggaagctttcaaagatcagtgatcatcattcacatgtagagtatgcttatgccttccagagggacaatagagaaagagtagatactaggttgagtcaaatcctcagtagggatgcgttgatatcagccgttgatttgttgtgggatcgctcgggttttgtttcactgaaagaagggaattttgattatgtagatagggatgaagttagttcagaaaaggctaagtctcaattgtcatcgactccacagtctagggttagattattgggagtggctgaaaagatgtatagtttcgatccgtataaccgaaaaagtttgttgaatcagactgatggatctaagtctatatgtggttcttgcaaagggattggttttccgttcgaggctagatggaagacgttgtatagctggatggaaggagtgcttccaagttctactagatatcatgaagaaggggctgagattgagaagagagaaaattttgaaggctgtattcttaatccagtgagcagtaaagaagaactcgcatcaagaaatggcgatggttgtgattgtgtctttgatgccattggtgccaaggaccaatcaactgtaattgaaccaaggagtcttctattagcaacggttgcagaatcagtggtagacactagagtatctagatctaatgatgtgaactatctctttttgctttacaaagataggtgtgtcaataataaaggagtgaatatgataagttcaaaatgtagcacggattgtgatgctgaggtttcttcttcagggaataacttagacgaagactgcttatctatcgttgaaaataaacagttgcttgagaaagatagaaatgacaaagagactgaagtttgtttgtcctctccagaaacgactacttacgcttttgctaaacagagacatgcttttgctggtgcgttggcaggcataagcgtcagtctttgtcttcatccacttgataccgttaagacaatgattcagtcatgccgcttggaggagaagtctctatgcaatactgggagatcaattatatcagaaagaggtaaaatgttttacttgtgatgatcaaaaaagggagctttctgtatttgtttgtcactgcgccttgttgcttaacataattacatcccaatatgtattcaggtttttctggactttatcgagggattgctagcaacattgcctcatcagctcctatctctgccctctatacgttcacttatgaaaccgttaaaggaactctgcttcctctttttcctaaggtctcttttttctcgcatgtctccattcttctgatggcctgtttcgcagaataagtaaagtcatattactaaattcttgaaatttcaggaatattgctccctagcccactgcttagctggtggttctgcaagcattgcaacttcttttatcttcacgcctagtgagcgcataaaacagcagatgcaagtcagttcacattatcgcaattgctggtaaatatttgcaagcttaatctaaacttttgttaactgcttcatatacttccatgttctcttgtctcgtaaaggtttcctagcttaataaaattagttcacattgagatttgtttcccattaccctttctttaatttcctcttgtgctttcaatatgttctaatgatattttcatcacatatgaatacaggaccgcattggttggaatcatccaaaagggtggtctgctttctttatatgctggatggactgcagtgctatgtagaaatatcccgcactcaatcattaaggttcgttttgcgcacactataatgtgttcctaaaatgctctaattaggactagcgtctagatcgtccacactcttctgctattctttttctctgcttgtattgaattctgatgccaaatttattggaaatacagttctatgtctatgaaaacatgaagcaaatggtattaccatccccaggcccttgtggtgaaatggctcaacccacaacattacaaacggtgtgtttcttcactgcttcatcccataacaatgtgcactttatgattctcttcaatcttagcaatctgtatttttatttttaatatggagaacctgagaccacttagatgatattctgataattgctcctaacagcttacctgtggaggactagcgggatctgctgctgctttcttcacaaccccatttgatgtagtaaaaacaagattacaaactcaggtttgtttctcgtttaggaaccacgttaacaattgtcgtcaacatctaacttatcccatggctgcagattcccggatctagaaaccaacatcctagtgtctatcaaactcttcaatcaatacgaaggcaagaaggtctgagagggctatacaggtctctgctcgctttcactagtcatggttattgcaattgtatcatccatgtcatgcttcatcaatttaccagcatgctactctcttcttatatgttgcagaggcttgatccccagactagtgatgtacatgtcgcaaggagctatattctttgcttcgtatgaattttacaagagcgtactctctctagcagcggcgcagcctaatacgtcagctctctctggcacaaaacaaaagatggagatagccttaaatcgttaaaggacaaagatagttcaaccccctatgaaaccaccaagactgcaacatatgtaatacaaagaatggaaaattgtacatttgtttcgtttttgtaactattgatttgattaaattcatttgtgcaaagttctttttgactggagagagaagaagaagatccattattcactacaagttacaaaacttttttttgaaggatctaccaactctacgctcataagacttctaaccaaataggcacctcccacttgctaccttacaatatgaacagtgtggctttttcttttgcctagatcctaagaagaataaataaatgatacaacaaagaatgtgacgccttcctttctcagtctgaaaatcagagaccatcccatcttaagctctctagcttgtccggcgagtctactgcttcatggttgcgctttatcggggaagttggagaccaaccttctctcctcttcttttcttatcgccaactcaaatgcacctgcaatagtgatagcatcacagactacactcgggagattggcgagaaaggaggattcggcatgtaggattgaagagcggtcacagcttctttcagaggcttagggacttcttcttcctctgttactgcttcaactaagaactgaacatcatcatcaatcagcattttcaacgagttgcaatgcgaaaactgttgtacattctcgccatttctgtaactatctgagacttccgtgttatgtaatatggcaacacagatggagaatgcttgcaatgttgataactgcgcgtggaaatgaacatcgtactgtccttcctcaacaaatgacatgtacaatgctggtatatgttctttagcaccctacaatatgaagaagatatgtgttaaaatgataaacagaagaagagttcctttaaagtcttcaataattttacctggacaaatagttgcaaaggatgctgattttctacaagaggctgatcatgagaacatgagatacgaggattaccaagaaccataagtggacaagccatgtcccaaccaccacagtcacaaccgcctcctgacctccatcgctgaatcaaaggcgaaggacaagagttttcggtagttggtaacccgtggtttcccctcgggattacaaccttcagtttttctaaacttctgctgccaaacaactcctttttctcctcttctattggagaaagaccaagaatattagttttctccatcagtcttttgtcacctcttctatattttaagctttctctcttctcaatagtgtcttgaataattatagctgcgatctcaaggtcaggatgcaaatttgcagctgaccacgggtttgttccatttgaagcctcaagatcatagctttgagatgttcttttaggctgagatctctgcttcattgtatccgaagcatccccggacattgagttatttcttatctctgagtctgatttaacagagttcttggaggcattattaaccgtatcaagtggtagtgattgatcttcctttgtggagacacttcttcttgcttgtgcaatatcatacaaaacaaactcattcaccatcaaagtttctggatcttgtcccttttttcttacttctgaacacatcttacaggtaacttgcatctgagccaccagcaaagattctttactaacatcggtcaaaccccgcacgctagcactgctcctctttctgcttccagcagatgaaaatgtatatacccaagtagaaccattgtcagatttccacgtctttgcagcgtaaacttcctcaggagaatctgaaacaaactgaaaaaccggtaatccattcttgctttccatcttgagacggcaatgtagatgaaccggggaagatttcagcaccgaggtataatccttattgacaactggaggaggacaaagattcgatcttttatgaatgtttgagtagtcactcaacatagatctgcaacgctcactgttcctccccaatttgaactgatcacctgattctcctatataaccaagaggacttctcaaagattttgatttaacaaatggatcaaacattttcctaactcttgagctgtccttattgtaactggtttctactgagtctacctttgcagaatatggcttaggcaatctaatcttatggtcattatcatctgaatccaacactacagctctatctttaatacctgacttcaaacaaatgtcaatgaagttgctagaggtgcaaggttcaactaatgacttctgaccatctaaaaccgtcttatgcggtcttttctcagtacttcccttcctcgaagaatcaacaactctaaaggagaaagaagcatcactactacgagacaactcaagtttcgcctttgaatctttacgtccttgtggttctctaagttctttaaacaactcattagagctttgataaacagaaccgcgccttagctccgttgtatctcccattgcaagtggtttagaaggaaagttcttacatgatgtgctacggtaacgcctgaaacttatctcggtgaaaccttctttgactctcaatatctcatctctacgaggcggctttagtcttgtactagtcctcttttctgattcagtgaatggacgaggaggaggaagaacactattggggctttgttccatatcaattcctttaccaaattccatttccactccaatcaccacttcaaaacatctgtaaaacattacacaatacaagaaaacagtttagtcctcctaaataaagacactttcaatgattagtagatgaaacatgctaaaatgaaatctctgaaaatttactaaacaacttcttgtaatgatagtaacagattagagttttaatcagtgattagtagatctaatgaatagaatgtcataaaagcttcaaaaggattcaaattaagcttccaaaacacaaactacacatgcaaaagtaatgatcttttgattcatacacaatgtagatctcatataaggttgatagagcaaacaaaaaacccaattagtagtaaagagtgtatcaaaacaaccctagaaaatcagaaagaacccaaaatagcagtcaaagaagaacaacaaaccaaaagaatcagatagcattaagcaaagaatcaatttttattttttaaagatttagagaaaaaaagagatctaataagagacacagatagagacataagagaaaaaaacaaaacatacccgagttacagtgagaaacagagtgtgtaaatctcaaacatttcttcatcgacatggagaagaagaagaagcaatagagattacaaaacactgaaggtggtaataagagaaaccgatcatgttctttgtaatgtaaacaaaaagatagagaagaaaaaaaagcaatcaattagttttctccatcaaggcatcattttgtttctttatttccctcttcgagtgtgcaaaaatctatctctctctctctctctctctcgcagtcactatctctcacacactgtacttttgctttagcttttttgttgtctgtttctttttcacttgttctatcaaacaaaggtttttttcacttcaatgaagtgttgtgtgtgacctaagacaatcttaccctttgtcagaaattgtcgctaaaatatatagaagggtagtttcgtcatttaagtaaacaaatctggtgagacactgagagagattaattaaaattttggatcggttcgtgaaccacaaaaaatattatttacttgtttctcgggaagttcatgtgggattcctatccccaattaaaatctttcgactctatgttaattttaattttatttcgaaaagagtttatgaaattaatacttgtgtgatttattggaagtggtatacttaatttttttaagattactattaaacaatatactctgatagctagttttctatccataatgggccgcatcgtaattgggaagacccacttttgaccaaactttcaactttaaaacattttggtccaaattggtaaaagacaaaaattagtttatagggatttgggattgaatgactcgtcactcgtataaattaatttggtgactccatttagtattttggagaagaaagtttaaagtttgtgtttgtgtttgtgtttgtgtatgtttgccctttgattatgaacggtgaaatctagactaattttgacagtatgtacaagattaatctagattattgcctgcataggctgcattaaaaaaattggtgtgtttaattgaacgacgccgtgctaaaatatcgaacggcgagatttatagcttcagtttttttatttgaaacactgtcgttttgcataaataaaacgacagcgtttaggtcgataaatgactgcgtattggtaagttgagacgacaacgtttaaagccggcgtttttaaattataaacggcagagttttggttaagggaacgacggcgacgatgaatatggtgtttccgaagtagtttcaggcgatgatggtgaataatattacgaaacgacagtgtttagatagattggcgtttggatttgcattactcgaaaacattgttgaaggcgatggtgtttccgacgttgcgcgatacccatgtctcttgaacttttcgggtatggccatgtctgggaatctcacagatgaagtttctagtgaggaaagaagtcagagcaaatgatataacttgtcataaagaagaacaaaagggttttcagattggtgggattaagccaaagggttttgctcatggaagtgtttgagaaagactgcttcttgtgaagatgcttcttgcgacatagctaatgagggtgaggtttctttggatctgatattgattcggagtatctggttttagaaatgtttgtgatagagactaaaggagccattgttggccaaattaagaattgaatcgtatatagaagacatgagacatgacttatataaagagtgtttcagtttccgaatcatcttctgcttcaaagtaaactgttattaatcactttgagtaggtggctctttttcttttctcttcaggttaagattgatgtcttttgtgttttgtgttgtttctttctgatttttggaattcttttggtcagctgcactgtttaatctgaagcaagcaaccactcgctttctgtcaattcggtggaagtgtatgctgaaacttccgggaagacttgaagttgcagagacattttaaagcagtcaatgtatctaacagctgttctccgcttctcaaatcactactttgctcggtaaggccgatataccaaacaaaaacacaaatgttcttctgttttggcctttgatgatgaaacattatgttattagattacttggatgctacggttctgtacttctgttcatgtttactagaacctctctagttatccgtgttgagtcggtatattgtgctatagttaatgcgtttctttctggttcaagcgagcatgttttggaccaaaaaccttttggtaaaaagaaactttgcaaagtgcaatgaagtttgcattttgtttgttttctataatttacaaaataactcaagaaaatgtagtcctcagatttatcacagtgatcatccatttcaatcaattgcttcttcaagtactcagagagtcgcgttgatttagaaaatgttattcatgatactccaaaaagctattgattgtcctgcaacaacatgttcagagtcttgttatggcttgaagtagtagttgagagtcacagtgacttgttggaataactctgagtggtccagttcataatttctttctaacaagttgccattgttttatttatattctctatccatataataaaataatgtttacaacttgctcttatgaaaggcatggttgtgtaagttagtctatattcagcttgagacactaaagaaactcatctattccttttttggaaaatgcgtcaaaataatctcttctcattgatcttctggcttgtccctgtgagcttaattattgttgtctctgcacagttatgctcggagaagtttggaacttttacaccaggtggtacatttgacaagaaccgccgaatcattctctcatctcttccatctgaagtcacagctcaagatggcttctacaacgcttcgattggaacagatcctgaccaactctacgcaatggggatgtgcatcccaggtgctaaacaaaagctttgtagggattgtatcatggacgtcacaagacagttaatacagacatgtcccaaccagacagcagcaattcactggtcaggtggagggaaaactgtatgtatggcacgttactataaccagccgtcttctagaccattggatttggaatcagtttctattggttataacgttggaaatctcagcacaaacttaacagattttgatagattatgggagcgattgatagctcatatggtgactaaagcttcatcagcatcaataaaatatttatcatttgataacagtagattctatgcagctgatgaaacaaacttgacaaattctcaaatggtctacgctttgatgcaatgcacgccagacgtctctccttccaactgtaacacttgtttaaaacaaagtgttgatgactatgttggttgttgtcatgggaagcaaggcggctatgtgtatcggcctagttgcattttccggtgggatctataccctttcaatggcgcctttgatcttcttacgctagcgcctccaccctcatctcagctgcaatccccacctccagtgaccaacaaaggtatgtgatttacttaaataaatgatagaaataacccttcttgtattcaactctaagaagagctaggtgatttggtcttgcacagatgaaaaaacgattcatacaggaactatcattgggattgtcattgtcgttgcaatggtcataatcatggctctgcttgctctaggggtttctgtttgcaggagtagaaaaaaatatcaagcttttgcctcagaaagtgagttcctcttgttttctttcttatcagctggtcttgctgctaatttacgaaagaatttcaccgacctgaccataaaaccacctacattttcattgtgcagctgccgatgatattacaacagttggatatctccagtttgatattaaagacattgaagctgcaacaagtaactttttggcgagtaacaagattggtcaaggtggtttcggcgaagtttacaaggcattttctccccaactactcttaagttgtatttgtgttatgtttgaagatattgagatagtgggatgattagttagattcagttgtaatatgcagggtacgttatcaaatggaactgaagttgcagtcaagaggctgtcaagaacttcagatcaaggtgaattggagttcaagaacgaggtgcttcttgtagcaaaacttcagcaccggaatctcgttaggcttctcggttttgctctgcaaggagaagaaaagatactcgtctttgagtttgttcccaacaagagcctcgattatttcctcttcggtagtactagtagtctaattttcctcttgatccaatattcttgaaatcttaagcttggatttgcaaatggatgtgcagacccaacaaaaaagggtcagctggactggacaagacggtacaacatcattggagggattacacgagggcttctctatcttcatcaagactctaggctcaccatcatacaccgtgacatcaaagcgagtaacattcttttagatgctgatatgaacccgaaaatagcggatttcgggatggctaggaatttcagagatcatcaaactgaagacagtacaggaagagtcgttggaaccttgttagtattctccttattatttacaatgggcacaattctctgatgaacggtttttgttactgactaacgtaaacattgtcatgtatatatttgcagcggttacatgcctccagaatatgttgcgcatggccaattctctaccaaatccgatgtctatagcttcggagtattgattctagagattgttagtggcaggaagaatagcagcttctatcagatggatggttctgtttgcaacttggtcacatatgtgagctgaaatctaaaatgctttttttactttctaactgtgatcatcgattctgaatacgagtttgtttgcaggtttggagactttggaacactgattcatctttagagctcgtagatccggcgattagcggaagctatgagaaagatgaagtcactagatgcatccatatcggacttttatgcgttcaagaaaatcctgtgaatcgaccagcattgtctacaatattccaaatgctcactaatagctccattactctaaatgtccctcaaccacctggatttttcttcaggaacagacctgagtcagacacattacgccgtggattggagccagaccaatataacaatgaatctgttacttgttctatcgacaatgcaacaatcactacactcctcggtaaaactcttgcttctgcactctgttgtattacctcaactctattttcaaagtcaatgtatagaaacactgaggattgaattatttttgaatattaaaagttatctcattttgattctggtttatgtattcacgttcattttttgttaagaataaatgcttggctcacctgcccaataacatctttttttgaccaaatcaaggttctcaaaatagtacggtgaatgaaatcaaactaggctatccactgttttatcctcacatgtttctgctttgtgtcttccttcacaaagatgcagggactcagtattttagacccaacggtactcattccttaatggagactaagagatttttaaaacaataggaaccgacgacttaaatacttgtgtttggtcattgcttgttgcattgtgttttggagtaagttagaacgttttggtgtcaaatagggcctagaagagctacagatcaagaattggtctacgttcactttcatcatatttacctaacgtgtttataaagtattaaattatccaaaacgttgacctaggtgacttgtgcattaatgcacgtatccactacttgacgaaaattctacacgcgaaagctgttttgaccaaatcaacgttccaaaataaacatttccttttaaagattcaagttctaagatctgcaacaagtatctgagcaaagtaaaatgtcaagagaaaaaatgtgtttgaacactctctgtgcaatcctctgttttgtccttaccgttagtttcggcttcgtctctgcccaaaaatgcggggagtctgtgtttttcagacctaacggtaactatgacactaaccgtcgtctcgttctatcaacgttagcttccaacgtcagttctcaaaacaaccgcttctacaacgtttcggtcggtgaaggagctggaagaatctatgccttaggtctctgtatcccagggtctgatccaagggtgtgttccgattgtatccaactcgcgtctcaaggtttattacaaacctgtccgaaccagaccgactcattctactggacaggcgacaacgccgacaagacgctctgtttcgttcgttactctaacaactcgtttttcaacaagatggctctagagccaactcacgcagtttacaatactatgaggttccaagggaacctcacagcttatacaagaacatgggacgcgttcatgaactttatgttcacccgagtcggtcaaactcgatacctggctgatatatcccctcggataaatcaggaacctttgtctcctgatcttatatacgcgctgatgcagtgtattccggggatatcttctgaagactgtgaaacctgtcttggaaaatgtgtcgatgactaccagagttgctgcaatgggttcataggtggagtcgttaacaagccggtctgctatttccggtgggatggttataaatattatggtgccttcggtgatgaagcgccatctcaaccccccacgccgcttcctcttcctcctcctcctcctcgtgatccagatggaaaaaagatctctacaggagttattgtggctattgttgtttccgcagttatcttcgtggtgctagtcgctttaggattagttatttggaagcgaagacaatcatacaaaacactgaaatatcatagtgagttactttttttgtttttgtttttttatcactctcacattacttattggaatgcatattagtaaccatgcatatgttatatatttgcagctgatgatgatatgacaagtccacagtctctgcaatttgattttacaacaattgaagtggcaacagataatttttcgaggaacaacaagctaggtcaaggcggattcggtgaagtttacaaggtatatttgagctgagctctacatatatctatgactgcttgatttgctgtgaaaactaagaacttataagtttttcatatgtagggaatgttacctaatgaaacagaaattgcggtaaagcgtctatcgagtaattcaggacaaggcacacaagagttcaagaacgaggttgtgattgtggccaaacttcaacacaagaatcttgttaggcttcttgggttttgcatagaaagagatgaacagatacttgtctacgagtttgtttccaacaagagccttgattatttcctctttggtaataaacaataacacttggtttaatttatgttcattcatcaaattttcttataattatagtgtaatttagatccaaaaatgaaaagtcaactagattggaaaagacggtacaacatcataggaggggttacgcgaggacttctctatcttcatcaagactcaaggctaacaatcatacaccgtgacatcaaagcaagtaacatacttttagatgctgatatgaaccctaaaatagctgattttggaatggcaaggaattttagagtggaccaaactgaagaccagacaggaagagttgttggaaccttgttagtactccgataatctctttaaaattgataaacctttttctatttgtttgtttctgattaacataaacctttttatgttgtatatttgcagcggttacatgcctccagagtatgtgacacatggccaattctctaccaaatctgatgtatatagctttggtgtattgatcttggagattgtttgtggcaagaagaacagcagcttctttcagatggatgattctgggggaaatttagtgacacatgtgagcagaaaacaatttaaaattttactttgtttagattgtgaccatcaaggatttggattctgaatatgagtttaatttcttggcaggtttggaggctttggaacaatgattcacccttagatctcatcgaccctgcgattaaggaaagctacgataatgatgaagtcattagatgtatccatatcggaattttatgtgttcaagaaactccggcagatcgtccagagatgtctacaatctttcaaatgcttaccaatagctccattactctgcctgtgcctcgaccacctggatttttcttcaggaacagacccaatttagaccccttaacctatggatccgagcaggggcaatccagcagcatgtctgttcctttttctatagatagtgcgtcaatcactagagccactcctcggtgagatgattgcttttgcactagtcagtagcattttacttgtaacacaagcaactccagttttcaaaggtccagttaatttttatggtaatatgggtacatataaaaccaaacttatgtgtagccgtgtaggtagagtattcctttcttgttttttcccatggcaagatgagaatttgtcaaacctcaaatatgatacattaacctctaagaacaaccacttacgaacccatttttttacttcttcagtcatctatgatagtcaccagcttgcttattcagctttttgctcccccagattttctataaagtggcaacaaattttattatttcccctgaaatatccatgcaactacacttatattatgatgatgttccaatgattttgatcaccaacatttgtagatctctaaggtttttatgtttcatcaaactctatctagcagcttcacatgtgctagtatatttgtaacgtctctcatccaagtcctctctttcaaagactggttttcgctatttcaagaggctataaagacttccggaagcacacttaattaactgtgacaggatgtttcaccgaaaagataagtggactttggtgacatagattgcctctccgaagcactatatacaccactatattcctttaatagaggtgttacaatatcatcttgataaatattaccaacaacatgctattgcttgaacactaaacgtattaactcataatcgctaacgaatttgaacatacgtcttgaaataagaccaagaatcgacacaagctaacgagttctcctatatcacgcgtggtgtgatctttagcgtacatgtcaatggaattaaacacactatctccagtataccaccagaacagagttttaacagtactgcaagtaacaaaccctttatatagtactgtttgtattataatactttaacagaaaaagtccgcaacactaacagaaaaagattttatatttatcgcattgacttgactatgtttgtctcaacaactacttaacgaaaattcctaccacccatactttttgactaatcaacatccaaaatgttctagtaaaaccattaccgagctgacttgaatatgctttcctcaattacttaacaaaatttctaaccaaccatgctttttgacaaaatcaacgaccctaagtgctacagtaaaataaaatgtgtacattatttacaatctgtaacacatacctgaccaaagtaaaatatccaaaaaagatatgtgtctgcaaaatctcttgtcaatcctctgttttgtcctcgccattagcttcggctacgtgtctgcacaaaaatgcgtggattcaatgtttttcagacccaacggtacttatgacacaaaccgtcatctcattctctcaaaccttgcttccaacgtgagttctcgagacggctactacaacggttctgtcggtgaaggccctgatagaatctatgcgttaggtctctgtatcccagggactgatccaaaggtctgtgatgattgtatgcaaatcgcatctacgggtatattacaaaactgcccgaaccagaccgactcatacgactggagatcccagaaaacactctgtttcgttcgttactccaacagctcgtttttcaacaaaatggatctagagccgacaatggttataggagatctaaatagtggactattccaaggggaccttgcagcttatacaagaacatgggaggagttcatgaactctatgatcaccagagtcggtcgaactcgttacctggccgatatatcccctcggataggttctgctcgtatatatgcgctgatgcaatgtattcgagggatatcctctatggaatgtgaaacttgtattcgagataatgtgcgtatgtaccagagttgctgcaatgggttcataggaggaactattcgcaagccggtctgctttttcaggtgggatggttctgaatatcttggtgcctttggtgacacgccatcgctacctccaccatctccagatgggaaaacaatatctacgggagctattgttgcagttgttgtctccgtggttatatttgtagtgctgctcgctttagtattggtcatacggaagagaagacaatcgtacaaaacactaaaacctaaaagtgagtttttttttctctcttaattgttacattgcttttttttggaaccagtagtagaaaccatatataagttattgcagctgatgatgacatgacaagtccacagtctctgcaatttgattttatgaccctcgaagcggcaactgataaattttcgaggaataacaagctaggtaaaggtgggtttggtgaagtttacaaggtatttttaagctgagctctacatatatctatgctagcttgatttgtcaaaaatactaatcacttaagaagcttcgatagccgcttcaccgcaactttggtttcattcgtcagtaattgtaatattgtatatttgtagggaatgttaccaaacgaaacagaagttgcggtgaagcggctatcgagtaattcaggacaaggcacacaagagttcaagaacgaggttgtaattgtggctaagcttcaacataagaatcttgttaggcttcttgggttttgcttagaaagagatgaacagatacttgtctacgagtttgttcccaacaagagccttaattatttcctctttggtaataaacaaaaacacttacttggtttaattatgtgcattttaccaaatgtttttaaaaatatttgtcttatgcagatccaaccaagaagagtcagctagattggaaaagacggtacaacatcataggagggattacgcgagggcttctctatcttcatcaagactcgcggctaaccatcatacaccgtgacatcaaagcaagtaacattcttttagatgctgatatgaaccctaaaatagcggattttggaatggcaaggaattttagagtggaccaaactgaagacaatacaagaagagttgttggaactttgtaagtattctaattaaaattctgcttctgtttctgattaacataaaatatttcatctatatatttgcagcggttacatgcctccagagtatgtgacgcatggccagttctctaccaaatctgatgtttatagctttggagtattgattctggagattgtttgtggcaagaagaacagcagcttctataagatagatgattctggtggcaatttggtgacacatgtgagcaaaaaccaaaccaaaatattactctgtcttgattgtgaccatcgaggattttgataatatgagtttcttggcaggtttggcggctttggaacaatgactcacctttagatctcatcgaccctgcgattgaggaaagctgcgataatgataaagtcataagatgtatccatatcggacttttatgtgttcaagaaactcctgtagatcggccagagatgtctacaatatttcaaatgcttactaatagctccattactctgcctgtgcctcgaccacctggatttttcttcaggaacagatccaatttagaccctttaacttatggatccgagctggggcaatcgagcagcaaatctattccttatactatagatagtgcgtcaatcactagagtcactcctcggtaaaatgattgcttttgcactagtccgcagcattttccttgcagcacaagcaacttctatgtgtaaagaagttgaagatcaaatttgttttgtactaaactactaatgggtacatatatataataccaaacttctgtctaggtagagtactactagtcctttcctgtttgtttccatggcaagacaagaatttggcagactactaatctgataaattaacctccactacaaccacttatgaaccaattttgtatagaaggatctagaagatcacaagaataataaataatatattagatccttctatattttgtttagacttcttcagtcttttatgataatcaccaaaaacatctaatcctacgtgagactagatattttctacaaattgacaacaactttgttctagcacaattaccatgtgtttatattataccaaacgccaaaacccaaaagttaaaattttctacacataaattttgacaaaagctatataatcaatgtttaaatgattttgtggttaatagacaaaattttgtaaacgaaggaattgacaaaaacaaaaaaagagtctatgtaattaaaaaaaagtgtgtggacaaattacatttagacaaaaaaaatggagttttttttctttacacggtggattaaccttaaaatcgtttcagaaatgtgcccatgtaatgtaattggaggaagaaaaaatcatcccaaaaatagttctaacaatagatcacattaattacaatatttgtaactatggcttctctatttttctgtaaaatataaggccgtaggacattgtttttttttttttttttttctttttccaagtaggcacgacactgattatgccttagattccccctaaatattttagcccatgcacatcacatgtataattggtttcaagtttggtttttcttgcaagagatgcttccgattttataaacttttaaattttactctttgtttactataaaattccctgaataatctcccaaaatgtgtttttcttgtgccccctctattttgagggctagctctttttaaaaataaaaaataatatattaatatatgtgatgataattatgagatacaatttatggtaatttattttttgataatttagtttttttttttactttgaaatttatttctcgtatttgtaattctgatatacaaggtttaaagtttaacaatagatattaaacatatttcagatagaaaattaattaataaactatcaatgatgatcaatagaaagttatttaatttatagtttaaatcatacattatatgaagacacacatacaccatagcacaatagtgattatgccatggtctacttatttaatatatttacaatgataattatttatgtagtattgttaaatacaattattatgaatttttcttatataaaaaaattgtcgatgaattgctatcatttgatcttggttatctgattgtctcataaatctatgtggtgtgcggggttccatccgatcgacaccaatatctgcagttacatactggatttcctttcttggattgtcctgtagttgcaataggcttgcaaaaactaactccttgaggagatatcttttcacataaagaggtacacaatttcgaatcacatgttgatgcacccttagatacatgtgaagcatttgttagaactttaatacaaagacgttgttttcccactgttcctttcaccatcatccctaatatagtaaatatttgagacataaaaatatcagtttcttttttttgaagattaatgtttaaatacttttgcatatattaattaataaagtattggacataatggaaaaaagctatccaaaaactatggatactatggttttggaatgactttgatctttaacactatttgacaaggttttgatataaaaatattgaatttgctattaaataattaaatttagctatttaagtgagatatagaattgacattattcagatagattgcatgttcttaatatctaattttattttcatatgataaaatatataaatattttttaagaaaatatgtttgtaaatctaactacaaacctattgcaaggacgatgaagatagttagaatggttgttgatagttgactagctttcttcatctcatatactctaaacaaattgatgatgttttttttttttttttttttttttttttttttttttgttttgtcagatgatgtttttggttaatttgtttaatgaaaaagtgaacaaaatttaaagtatatataagaaaagttagatgtgtctatttttttaatgatacatcttagatctatcacctcctgaaatttaggttaaaaaaacgtggttctccattaattccatttttttgttaaaggattgattccaatttttttccttatctaattaaggagtcttagaagttagaaccacacaataatttcagttaacaccattaaattacaaaaaaaaactttttgatgggtgatttaagtaagaggagaaattaaaaaaaagatatatgttcgccttaaaatttgttgaaacaatgtgaaattcaaaaataataataaaaaatcaaatgtatttcggagactgcataactcgtctttggataatacattaataccatacattttttcttttattctagtctcttttctatatatatatatatatatttatttatttatttatttttaaaaacctatttagataaaacatagaagattttaaagaatagaatgtatttacgacaaaaaaagaaaagaatagaatgtatttacagcaaatgaaagtaacatacataattacatacaaaaagctagtaagaaccttcacaccaaaaaaaaactggtacgaaccaaactgatttaccaatcaacagagccgatcctaggttgtggggcttaaaacatttttagtatgtggtctttccaaaatatactaacaataaacgtttaatattaataatctataaaacatgaaagggaaaaaatactataagcattatctgaacgtgaaacaaaacaaacactatagaaacgtgaaaagaaaaaaattgctaagaaaaagggtaatttgcagcaaaaaaaaagaaggaacgaagtaagtagaagttgtggtcgtttgatcccacgatcaaggatgggtcgggcctgccaatcaacaatagaaaaatatattgtgaaaacattagcaatgaattgtcactagtccaaacagattacaacttttcaaagttctttacaccctcataatttcttgttttatgcatccaactctatggtttagcatatgtggtccagttgtaggagggagctttggtaaagggttttgttgtaatcttaaaacttggggcctatttatagaagaaaaaaaataattgagggcctattttgtaaagaaaaattttctaaaactttgggaatcacattcaattgtttctccttgctccgttgagttaccgcactaatgctcactactagcaaacacactctttcagtgcgacagcctcatgagcttgaagttgtttagcaaatcggttcctaccaatgtactaaaccggttatataatctgattatgtataaccaaaccggttattgtataaatgtccaaccggggttcacgattctaccgttgttccgcctaattctgatttgttaaacgacgagaaatttcttatggaagttagggtttcctggccgttgattggttcgttccctgttaccttgttccattccaatcagttctcgtagagcttctaatgtcacggctcgtgatggcttcttcaattcttcgagtgggaggatgcgtaatccatgtgccaatagcagagtcgtgctcagattgtaccaggggcggatctaggtgtatgggatgtggggcacgtgccctacattaaattataagtattagcttgtaaacttatgcagtttaaatgattcagcacaactggttaagtgttttcaatattcgtccatccttacccaggttcgagactagttgaagtaacttttttctttttttgactttgctcattttttcccccaattttatcaatttaatcacttatttcttcctttgatttatgaacatccacttttaactttcttttaaaatttctttattaattgattagatagtatatgtgtattgatatatttctaaaatgtttgatatatctattcatttacttttatgtgaaaatgaataacaaagttatatgaacacaatttcatagtttttttttgggtacctatataaattgtgagaaacaaattacagaatttattgaactacatattttatcacaaacttatagtttaataacgaatagtatatataataattttgataaaaaataatatataataagtaaattaatagtgccccagattaaatatttttctagatccgccactggattgtaccatggaagcgtctgatggagttgtcttaattagacatatgccaatggaaatgtaatgctgtccgacaatcgtcttgatgcttcaagtagcctgtatttttttttccgtgggggttcgaaacttggattcagtcaggtcattctttaatctttactttaaacccattgtcaacaatgcctctagtaaaacaatggttttgtattactgtttgtgctgagaaagtaataagataagctattgaaattgtcaaaatattactaatttgggtctttggattgctcaatttgttggttatttaactcatatcactctgcttcgttgtgttacgttgaggagattcattcaacaagcatagtgggcgtgtagtctgggtgcatctcacatcattaacatttttgaaacttcaacattcttttaataaacatataacacatcagctcattgctttgattggttctctgattttgtctatgctctgacttagcttttataatgccttggatattttaagtttgacaacttgctgagagaactcaattgctatttaactgatatgaagtgtacggatatgtacatactaaccccaaacacatttgtaaaatcatgagaaagaccaagaagatttcctttttgatcttctgggttgttctcataagcataattggtgctatttcttcgcaacaatgcaacgaaactgggtattttgaaccttggaaaacttacgacaccaaccgtaggcagatccttacatctcttgcttccaaagtggtggatcactacggcttctacaattcttccatcggcaaagttcctgacgaagtgcacgtaatggggatgtgcatcgacgggaccgaacctacggtttgctccgattgtctcaaggtcgcggccgaccaattacaagagaattgtcctaaccaaactgaagcgtatacatggacacctcataagacgctctgttttgctcgttactctaacagttcattcttcaagagggttggattgcacccactttacatggagcatagtaatgtggatatcaaatcaaatttgacatatttaaatacgatatgggaggctctaacggatcgtttgatgtctgacgcatcctcggattataatgcatcattatctagtcgtagatattatgcagctaatgtaacaaatctgacaaatttccagaatatatatgcattaatgctatgcactcctgatctagaaaaaggtgcttgtcacaactgtctggaaaaagctgtttctgaatatggcaaccttaggatgcaaagaggaattgttgcatggccaagctgctgttttcggtgggatctgtatcccttcatcggagcttttaatttgacactttcacccccgccaggtaattcctcaactaaaagaaaaaatatgattctaagaacgtatcattctgctaagttgctgaccaatagtttgagaaaggtttgaaacagattcaatcactggatgatgcattttctctattgtaaactatcctctgtgattctactatgcccaggtagcaaaaggaatatctcagttggattctttgtggccattgttgttgccaccggagttgtcatctctgtgctatctactttagtagtagtacttgtttgcagaaagagaaaaactgatcctccaggtgagttgattcgtattttactcactgatttctttttctttaagaacaataaggcatgcatgcttaatcaggaacactgcatgatgccgggacaagggaattttaactaggaatagtttattcagttcaatggtcaactatctaaaacttcttattagctaaccaatgtttattagaaaaatgaaaaactttggtgaatatgaaaacatatcatcatggtttagatttgttatgtgtacgtacttccatgttgcaaggaataatatgacatttctgtgtagcagaggaatcacctaaatattcactgcagtatgatcttaagacaattgaagctgcaacatgtaccttttcaaagtgcaacatgcttggtcaaggtggatttggagaagttttcaaggtaaatcttctcaacttccattaatgaatataggtggtgtgatgatcttattctctttattatttgtagggtgtgcttcaagacggatcagaaattgcagtgaagaggctgtcaaaagaatcagctcaaggtgtacaagagttccagaatgagactagtctcgtggcaaagcttcagcacagaaatttggttggagttctcgggttttgtatggaaggagaagaaaagatactcgtatacgaatttgttcccaacaaaagcctcgaccagttcttgtttggtattttgcatataacactcagctcatagtttttgaagttctaatgatgaagttgcagttcttgaaacttattttaattgacttacacagaacctacaaagaaaggccaactggattgggcgaaacggtacaagattattgttggaactgctagaggaattctatatcttcatcatgactcacccctcaaaatcatacaccgtgacctcaaagctagtaacatcctcttagatgctgaaatggaacccaaagtcgcagattttggaatggcaagaatttttagggtggatcaatctcgagcggatacaagaagggtagttggaacccagtaagtaccctttcttcttttttgcctttcaatctctgaagttttgatgacctttttgtcactggtaaactcaagaattattttttgttttctttctagtggctacatatctccagagtatttgatgcatggccagttctcggtgaaatctgatgtctatagttttggagtcttggttcttgagattataagtggaaaaagaaacagcaacttccatgaaactgatgaatccggaaagaatttggtcacatatgtgagcattaaaaactaaactttggaaagactctacttttttaaccatgcaatgtaacgtaaggttttgactactagtgatcattgtggtaggcttggaggcattggagaaacggatcaccattagagcttgtggattcagaactcgaaaagaattatcagagtaatgaagtcttcagatgcatccatatcgcgctattatgtgttcaaaatgatccagaacaacgtccgaatttatctactatcatcatgatgctcacaagtaactccatcactttaccggtgcctcagtcaccggtatatgagggaatggacatgtttctaccttctatcaaatctcttcctggttctgtcaacgattcattgattgatgacttagttcctcgctgaagatgacagttacttcatatccgaggtgtttctataatttctcttagcactttttacttttgttgtgttgagtcatacagtgttactaaaatacattgaaactctctcttacagggtttcctctgttcaagcgaagttcgaagataagctgactcaagcaggttttatataactcaaagattggtgtttttgaaagttctaaccggaaatcaaattggtttgtatgattttaaccgatttctgtttacggttttataatgatgtctccttggctatcttttgttggggtttgaatttgtttcttttgtattggttggaggattgaaaactaatgtacatgtaaattttggctagtcaagtttggctgctgactccatttgtctccaaatttggtctgctgacttctataaggtctctcaattggctaacttaatgcacgttttccttttctttttttttttttgtttggatctctgcaaatctaatgtaaaatggagcgacataacatgggagttttctgaccaattcacactctacttgcttctttttttggcagcacactctacttgtttagttattatattgagtattatgaatccatattattggtggggaatggacattgtggttttgattattacttctaactcttttttttgtcaaaatcaacggtcctatctgtcatggaaaatcttcggaggataaaccttctaactttgaacatttaacacagtctttggttctgatcttgagagaagaaactcaagagttcatttgttctaatcttttgttctttccttgtaaggttagatgttgtttctgcacaagtctgcttcaatagctactttaaacccaatgctacttacgacttaaaccgtcgcctaatcttttcttctcttgctactaatgtcacaactcacaagggattctataactcctcgattggtcaagaccccaatagaggcttcatcaatagtatgtgcatccctgggactaaacaagagacttgttcagattgtatcaaaggcgcatcagacggcttattaaggagatatcttaaccaaacagaagcttagacatggccagattgttgtatggtacgttattccaacatttctttctctggattttgtttggaaggacaagaaaaaataaacgtttacgagttaatttgtacctaacaaaagccttgactatttcctctttggtatgttatgagcttagatacttttaagttccaagatgtccttattgttgctaatgagtcatatacttgcaaatgtacagaccctgcaaaacaaggtgaactagattggacaagacggtacaatatcattggggggattgctcgaggaattctatatcttcatcaagatttacggcttacaatcatacaccgtgatctcaaagcgagtaatattctcttagatgtcgacatgaaacccaaaattgcagattttggcatggctaggatttacagaattgatcaaagtcatgccaattacacaattagaatcgttggaacatagtgattttttttttctcttaacttataaccttacaaatacaaactatatttggtggttacttctaggctaaaaagtctaatccttatttgcagtggttatatgtctccagaatatgcaatgcgtagtcatttctccatgaaatctgatgtctatagctttggtgtaatgattctagagattataagtggtaaaacgaatcgcagcttctactacattgatggttctcctagcaatttggtcactcatgtgagtatatgatcgttcaagttatatgagtgtatatgattaagccaaaggatattaatttatttgatcacttttgttaggcttggaagctttggagaacagggtcaccttttgaacttgtggatccgacaatgggagagagttctcggagtaacgaggctattattagatgcatccatatcgcacttttatgcgttcaagaagatcctgtagatcgaccaatgttgcctgcagcaatagtcgtgatgctcactagtaacatagacaattaccgtttgcctctcaaacatgaatgaccaatccacaagcaggtctattccttgttctaattaacaatgatgtatcaacacagttctagatcctcgttgaagaatggtttttttcttgatattggaactgtattgaatatatggaagtatctacatcatctcttgttcttctcattactctactttatgagacatttaaacaagtatatcagatagtaacattgtacaacaagattcacgttttaaacatattttcagtaaccagaattggttcagacataattaggcattggtgtttcatgtttgtgaagccaataactgaattcatagtttgtataatttaggaaatagacataagaaaatagtttgaactaaacgaacgcaaaacattagttttttttatccatggggcttggttacattgttataattgaaactgttttttagtttttgttgtattatatcatctttcgaggaagagctggtggatctggaccacgacatctctttgatttttcacatcctcgatggtacggattcgccggttgatcgggtggacagttgccatgatcacatcctggttggcgatcgccgcgtcccattcctggatagccaatctcatttgcaactgctacgttcatgttgttgcttatgaacacacatgctatgaacattgccacgaccataaacctttttgtttctttcaaaatgctcatgatgattgatgcctttttcttatgtcaaatatgagtttagatagttcaagagtgttttatgagtgtaatagaaggtttcactttgtgatatttatagagaatgaaaattctgaaagacaatgatccatacatatcaaaacagtgatatttgttgtataatatggaaggaatctcggggagtttgatttgtcttaatctttagaagcattgtgtcatgaaactatttgttggtaatactaaaaatattatgatgatatcttttcgttttagttttacttaaacagagatttgaataggataactgaaattggcagtagaaataaactactaaatatatagatgccataatagttaatagtaaaatttttacttttatattatataaagcttgatttggttttcaaagttgttaattcacgtgatcgtgacacgtctcacatctgtcagttagattatgacacatgttgaaagattttaacattttttaactaaatagaaaaattaaaaagaaaaaagtacatatctacaaatactatttctaaaccaactgagctctattatcttaatccaaaaagtatactagaagaaattaacatatactaatttacatgtgtgttatagagaactcttaaaattgtgttccttaacccaaaaaacaaaaacgaacaaaaattaacatacatactaatttatgtgtgtatagaaaactcttaaaactgttttttcttaacccaacaaaacaaaaactgaaaaaaatgtttttactaatgtttctaatttttattatcggtttacacgtggaaggagttatatgactagaaaccgtgtgtaaaccgataatagataaagagtcatattttcccaaagatattagagaaggagtcatattttgcagttcttttttgtgctagttttactcatttcataatcaaattcaagatgttcaggtatcaatatttgatcaaattaccagtcatgattctataacttgtgtactgaatgcaaatggcaaattctgactagtataaatgggtttgattaaaatgtgttatccggttgggttttgttggttttgtgtggtctaagtttgtttgttgacttccattagagctattgactcagtcaactttaatttttcaaaggcatttgcataattttccttagaccatctctttcaattaagaatgtatgacaaattcagtgaaccagtcaaatctgccaagagaacctacatagtttgagttattgatgcccaaacaaaacttcttgattctaatatctaaacacaatcttttttttctgatcttgagagaatgatgctcaatactttatttttaccaatcttcttgtttttcctcataacctttgattatgtttctacacaaacctgcttcaatggatactttaaaccaaatggtacttacgacttaaaccgtcgtcggatcctctcttctcttgcttccaaagtcacagctcacaacggcttctacagctccaccatcggccaaaatcctaaccaaatgttcatcattagcatgtgcatccctggaactaaaccagagagatgttcagattgcatcaaaggctcaacagacggcttgttacgaagctgtcctaaccaaacagttggttatgtatggccagattgttgtatggtacgttattccaacatttccttctctggatcactcattatggaaccgtctcaaccagtgtctgatcccgcacctatcggtgttgatttgacattgtttgatagaatatgggacgagttaatgtctcgtacgataactacagcttcgaggactcatggatcattatcatttgggcataagtactatgcagctgatgttgcttcattgacaactttccaaactatatacaccatggtacaatgtacaccggatgtttcttcaggggattgtgagttttgtttgaagagaactgttcttgattacaagaaatgttgtcgcggtcacattggcggtgcttttgtaagaccattttgttttatccggtgggatttgtatccttttgctggagcttttgaaaatattacgttgccatcgcctccaccaccgctttctttgactcctcccgtaagcaattaatgggctacgacaaccacacaagtaatgtgggactgctgatattattcaaaacttaaatgggctcgtttattaaaaggcctctttctatttcttcttcggcccattagtaaaatgtctcattctggttactaaaattacggtttggtatggttgctcaatttgggcattacttttttgtgttgcctgggaaagtttgaaaatttaggtttcgttgcatttttgttgttgtttggaatctaatttgggattctgatgtatgaattgaaaacgatttttatgtaaatttttgttgttatactccaagtttcttctgttgacttcataacaattcaattctctaactgtatgtttccgacaacagtttcctctgttttttttgttggttttcaacgaatctgatgtacactataatagagtaacataacaaggaatcgtcagatcatttcataatatacttgtttgattatctttatcattatcattagtggggtctctatgtctttgtcttcttgttatctttaccagcttataagggtttggtaaagtcaacgaatcagtctattgttcatcttttacgccatggataatcttcagagtagatccaaatagtatttgaagttgactctctaacttctaacatctaaagcacaatcctttgttgatttttgagagcatgaagctaaagatttcgtttttaccaacttcttgatttttctcataagcttagattctgttactgctcaagaaatctgtttcagtggattctttaaacccaatagtacatacgatttaaaccgtcgtcaaatcctctctactctttcttctaatgtcacaagtcacaacggctttttcaactccaagtttggtcaagctcccaatagagtcttcatcaatggcatgtgcatccctgggactaaaccagagacttgttcagattgtattaaaggtgcatcagacaagatatcagagagttgtcctaacaaaacagatgcttatacatggcctgattgttgtatggtacgttattccaacgtttctttctctggttcactcgttatggaaccttctgaaactctctatcatacgggagatatcgaagatacaggcactaatttaacagtgtttgatagaatttgggaagagttaatgctccgtacaataactgcagcttcattgagtagtagtaatggatcatcatttggacaaaagtactttgcagctgaggttgcttcattgactactttccaaaccatgtatgcgatgatgcaatgtacgccggatgtttcttcgaaagattgtgagttttgtttgaagacaagtgttggtgattatgagtcatgttgccgtggtaaacaaggtggtgcggtgataagaccaagttgctttgtccggtgggatttgtatccttatgctggagcttttgaaaatgttacatttccaccgcctccaccgcagtctttacctcagccaccggtttctttgattcctcctccagttagcgatagggcaaatacaaccatcaaaggtaatttccttcatatgatttgtaacaagactctgttgaaaccttatataattgaatcactcatttgcggcttgtgtagatggaaaatcattttctacagggattattgtggctattgttgttcctatcattgttatcttggtttcacttgttgtactactcgtggtttgcagaagaaagaagtcatataaaacaactgaggttcaaggttggttggtttttcatgttttgagtccataagtaagttatgtacaaattctggaaaagtggatgatgaagaagatgtttttcactttctttgtgcagctactgatgagatcacaacaacacactcactgcagtttagttttaagacaattgaagctgcaactgacaagttttcggacagtaacatgatcgggcgaggtggatttggtgaagtttacagggtaattagttctttctcttcctggtttgctacttctctgtataaagtttgactcatcttatttccgtagggaaagctttcaagtggacctgaagtagcagtgaagagactgtcgaaaacatcaggacaaggcgcggaagagttcaagaatgaggctgttcttgtgtcgaagcttcaacataagaatctggtcaggcttcttggattttgtttggaaggagaagaaaagatactcgtctatgagtttgtacccaacaaaagccttgactattttctctttggtatgttatgagcttagatacttttaagttccaagatgtccttattgttgctaatgagtcatatacttgcaaatgtacagaccctgcaaaacaaggtgaactagattggacaagacggtacaatatcattggggggattgctcgaggaattctatatcttcatcaagattcacggcttacaatcatacaccgtgatctcaaagcgagtaacattctcttagatgctgatatgaaccccaaaattgcagattttggcatggcgaggatttttggagttgatcaaagtcaagccaacacaagaagaatcgccggaacattgtaagctttcaattaaaaaaaactccgtttggtggttgtttgtagactaaaatgtgaatctttatttgcagtggttatatgtctccagaatatgcaatgcgtggccatttctccatgaagtctgatgtctatagctttggagtattggtactagagattataagtggcaaaaagaatagcagtttctacaacattgatgattctggtagcaatttggtaacacacgtgagtataatcatttaagttacatgagtgtatatgattaagccaaagaattattaatttaattagcaacttgtgttaggcttggagactttggagaaatgggtcaccgttagaactggtggatccaaccataggagaaagttatcagagtagcgaggctactagatgcatccatatcgcactattatgtgttcaagaagatcctgcagatcgtccattgttaccagcgatcatcatgatgcttactagtagcacaaccactttacatgtgcctcgagcgcccggattttgcctaagcgggcgtgatctggaacaggatggtgtagagtataccgaatccacaagcaggtctattcctggttctatcaatgatgcatcgattacagagttctatcctcgttgaagaattgttatgaatctgtggaagtatatatcaacatctgttcattgttcttgtccctgctctattttatgagatatataaaattataaatcatatatatgttgatgtacttgtaatacatttactgacattctagaataagaaacatgttttgaacctagtttcagtaataagaactggttcagacataatcttgtaccgtgtagcccaattttgctgacttttctttgcagggtctgcacggtccaaataataccatcagctaatgacattaagaccctatcatcaaagaaaaacactgaatgcaactgaccaaacgagaaaagattgaggctattgctcgggagatacttctagacaaatatccgctcttcttccttctagacaaaacccgagaagtctaactagatttcgatgctgaaactttgcaagtagagtaccctcgttcctgatgtttttgccaaacctcttcaactccactgaaaagtgtagcatacaaatacaacaaagtgcatcaacatcatcatcacgcaaaatggacgagatatactataatttagcaccacctcatatgatctgctggaaagagatattgcgctttttggcatgagccctgcaaagcgtcccaacacgcaatttgtatgcaaactagctcggtgatctttacacgtaatgtcacacaatagaacccaaatcttgaatctcttaaaaggtaaagtctttggaaatgggtccaaaggaggaagtaagagagagaactgaccaggtcccgggaaagaagacgtaggtgggagatggaggagagaaagtaatgttactgtcaaacgttgttgtattgggacggccatgacatgagcaagtaaagttttgagttgaaggaatgaagcttgtgagaaagacaaaaggaggaagaagaagagagcgatcttaacaacaacaacaagacatgctttgaataacttctcatgcttcaagatccttctcgagaagaatgatagtacatactcaaattaatattcctaaaagaagaaaaggaaaaatgtaattatctctcactcactcaactcaaaaggtgagatatttttaaatgaaaaatcgccttcattaagtgaaaaataattgaaagagagaaattgtttagtcttgcaataatacgaaacaaaacagaatcaaagtgttgatataactcaaaaggtgacacattctgaaaaaccatttttgggttttaacgatctatcttcactttgcttgtagtcttctggatcctgtaaggtatgcgcaattcaaagagcaaatgtgatttgaggttccaaggatcttcaagctggtaggatatatgcaatgcgacttacactccatgcaaaatggacgagatatactatatattgaccaccacctcatatgatatgtcataataatctattgtgcttcttggcatgagtcctactaagtctcccagcacgcactttgtatgcaaactagctcggtgatctttacacgtgtaaaaccatgtctttggatacgtttctttctcacaaatgtcacaccagtatttgccacttgcctcttcgccgtagcatagtgagagagggtgaccgtctactctatgctttaccacttgtggtaaagtggcgcaatcgaagcataagacatatccacaaccactttcgatgcacgtaagcacacgaacctcccgattgttgcaaccattgcattgtttttcttccacttgtgggatgtaatataaaggatgatggggatggcctggatggatatacggctccgagactaaaccgcacaaaacatctaacttcataaaatcacactgatacatgaagccattagacaatctactacaagctgtacacgagaagaagttggccacgcatgtaactaaagtaagccggtcattgtgtagcacgtgccattcttttttaggagattcagcgcagtgttggtgaagaatgaaatcacaatctttacaggcatagaacgattggagacgaacgggatgggtgcaagcactgcaacgcttgttttcttcccagagaagaccattaacatggaatcttaggtaatgctctttgtggctgaaatgttgtattgtgttgtcatcaattaccacatatggctctatatcttctatctcttcaggcactccttcgagttctttcccgttccacacatcctttctagtagcacatttcgagtgaacgacatattgaggacacctctgacaagaatacccaccccaagtccaatctaccttctggtgacaaacaccacatacagagttcacaacaccaagaacagaagtgcgagaaacacgatgagcatgccgattgatgtttatgaggcgtggaagggaaagacagtcttggtggattatgaaaccacattgaacacatatgtaagggcttcgatctcccttcagcccgcaagcattacatgtaaaagagtcgagtcttgggagaagggtgagttcgtgatcatgaactttcaaatccataacaaattgtggtggtggatttataacacaacgcatatctaagctgaagttgcaagaagaacaatgataaaacaatccctcaatctttcttgtgcaaagacgacatttttcatcagaatagtctggtggttgacttgtgtgtagcttaagagggtgtaaggggtgggaagaaatgtttacctctgattggttttttgcctccggtgggttccatacgcaatccatatcgaacattaaatgacattctagacatttgtaaggaaacccataaaacttcttaccacatttagcaatacagttgaacttggtccacttcttgatatgagtgagcttgtggtgatgcgtctcggaaatgtctataacatctggtggtgggtacttgacacagaatagatccacatagaagtcacagatcttacaacaatagcataaattctcgatccacatgcaacataaacgacatctatcataatctggtttactttgaagcttaagagcgttgttggattattgagagaaagaagaaaaacagagtaagagagacatatctcttctcttgtgaagaagacaagaacaaaactttgttttattgaagctgaaacttgttggtatttacatgacgatacaaggggtttatatagaaaacaaatagacacaacacataatgagttgtgtctcttcgtacttgtgtcccttgacaagtaaccacttaatatatgaaactttaatatagacagaactcaattatcgaccaacagtcccccttaattgagtttctgtcttcttccaaacttctcttcaacccttgaccttgtttacttctcccttgcaagtaaaacacttgtgtccgactttctccatctcaatggaaaaatcttctgcttcctcttaatatcaagtctccttcttccttgaggatcgttgatgagacatctattgtcttcaaataagagcccttagccattggaaatcatttgagaaacactcaaccaatttctcgctacaccggaactagaaaacacctctttgatgatcttctctccttggcttgttatcacttggatatttcctttcggtgtcctcttgatcaccaaatctgtgcgtgaactcctccacgtcttcttcggtgtctttttttttttttttttttttatcaccataacgtttccatgacgtcttgtgcgtgaatcttcttcacgtcgtcttcggtttactcttcaaccgacttatgctccatttttctccgaggtaagcatcatcttgtgctccatttttctccgaggtaagcatcctcttatggtgtcctcttttgatcacctccacgtctttttgacgtcttgtgcgtgaaaatctcttcacgtcttcgtcggctatctttgcaaccgaactgaactctgctccctctctcttaggtaagcagcttcacactcgtaggcaagctaacatctctgtgttgctttctccaacaatcacctcaatgtgatcgtcacacgtacaaaagtcacactatttcttggccttcttttgacttttgtcgccccgtttgtttcttccttttgaagcaaacttttctccacgttttcgtgttgtagtcatcttcacaactcaacacaacgttttgataataagccttgctcagtttgttacaacagcggctttcccgtcttgcgcttcaccaagacgttgttgaacaaattttcagaactctccttccacaactccaaatccacattcgttttctccattgcctctagagaagatttcctatcttcttcatcgcttttggagccttcctcttgaaggtacttcatgtgaatgtgtttgtgaaaactgatggtactttctcttgttaccacctcttatttcttcttcttccctcttcttcttcctcttcatctcaccatagatttgttgtctccatctctctttttcttttcgcagcagaagacatcttatttttgtagagacaaccaaggacaaccatcggctctgataccatgttggattattgagagagagaagaaaaacagagtaagagagacatatctcttctcttgtgaagaagacaagaacaaaactttgttttattgaaactgaaacttgttggtatttacatgacgatacaaggggtttatatagaaaacaaatagacacaacacacaatgagttgtgtctcttcgtacttgtgtcccttgacaagtaaccacttaatacatgaaactttaatatagacagaactcaattatcgaccaacaagcgtgaactgtgtgagatgggtgttcaatatattctaagcactcatcaacacatttcttgtggacataaaagtcacatcttttgcagtaatagccaccagtggtaaatccagagcgtccacagcaatcacctctctttagatcattccaaggcatcataagatgcttgtggatcaacggtagtgacactccctctaactccatggtcgtatactacaagatttgataagaagaagaagtgaaaaaaagaagaagaaagaagaagagaaaatggaatctgagatcttttttttttgctaagaaatctgagatctcaaaagtcaaaactatgctcaatctgagaaagtccatggtcgttctctctctacttaaatgtctttgtttaatctgaaagatgctcgtagtgctcatccaataacaattctattaaaaacatttatggtttattagttaaataactaagcaaagtacataaattgactagaagaaaaacaaatttttttttgtatgaatgtcaaatttattcaccaaaagaatgcatcagagtatcaaaaatctgaaacacatttgagatggatagtcacaacatgaaaaattcaaccgcgagtatgggtactaaaccaatattgcagccctatttcgaatgatgaccccagccttaacgaaagactaagccggttcctcacattcttattaatttgctttgagaacgtgggagccggtgttggtgtctccccgtgccttcgtccattccgttctttcaaaatcagaatctgtcaaaaggtagaaattttggaaatgggtatattctgaggaagtgggagaggtaaaaggttaaaagagttatgatgacggtgaagtatatggtgcaagtgacaatcgtattgactactgagacagtcatgatttaagtaaggttttgagcacaagagaaagacaataatagattatgggctttgtgtcttgtgccactaacttgtgcttctctctctatccacgtacttctctacttggccatgttgtggctgccttagatcttttatggtcgataaacataaagagacgattattgataaagatagtacacggaaataacagggaaatgataaccaaggtcttcgttttgttgtcatgataagctttacccgacttaaactatacggttaatcaactgttaaaagtgaaacccagtttgaattcagactcgaaactctaaacataaaagttaaaagttggaaaccctttactctagtttcttggaggcatttgttttttttttttgaatgtaatgttaaattaaactcaaaagaaaaatagcgtttgtacatcaagtgcgacttttgccgaaagagtttaaaaagagattttatctatttgctagttagttcccattctagattgaaaccaatattggagggccttgtcataccggcagtctccacttgcgttgattactgagattctgttccttacttgtttatcgatccgttgaaccagatgagtacccgagttaggagactccccatgtcttcgcccattcttggaggcatttgagtcattggtcttcaaggcttcgtcttgaggtttctcggtttcaccagatctggtcaaattcttctcaatatcctccttctctgtgccttgggcaggttttctgtgcttattgtcagagttgatgcctcatcccttgaagcataccaggaatagccacagtcaacagactccagctagatgcaagaacagaatcaaaatgtgattattaggatgcctcatcccttgaagcataccaggaatagccacagtcaacacactccagctagatgcaagaacagaatcaaaatgtgattattaggatccctagatttatttgcacagagaaggaggatattgttcaaaatctttgcaggctctaactcgccattgagcagtcgtctagccagcagtgcagtgttctgcagacacaacaaaaatgaaattacaattcaacacttaggagaaacgctaaaatgatgtttacgacaacctccacacaagctcacaaatatagacaagcatattattgtttggatgtgaagtacagtaataaaccattcctaaggtattctaatttaaccatgtctcatgaaactcatatataaactgtcataaaaacggagcatacaggcacaaacattctagtatggtcacagtctaatatagtttcctgttacaaaataaaaatattcacttctcgagcatcaagatccttcccaagaacaataatattattactcaagttttaagaagaaagaaaagagaaataaaagaacgcgacgatgactgttaagaagacaagtaacaagaaaatcatcttaatacattgaatgaaaattaatacacttttggggttttaatgaacagaattactggaagtacatacaacatcacaaacataacttttggattttaacgagcaatcttcactttgctggttgacgttttttgataccagaaacgatcttcggataccaaaaaccatctacgcagtttaaagagcagatgtaaagagctgaggatccaagcaccttcaagatgatagggtacatgcaatgtgactcacacgctctgcaaaatggacgagacatactattattgcgcaccacctcatatgatatgtgggaatacgttaatgtacttcctggcatgagccttgcaaagtctcccatcacgcactttgtatgcaaactagctcggtgatctttacacgtgtagaaccatgtactcggattcgtttctttctcacaaatgtcacaccagtatttgccacttgccttttctccatagcatagtgagagaggatgagcgtctactctatgctttaccacttgtggtagcctagcacaatcgaagcataagaaatatctacagccactttcaatgcacgtaagcacaagagatgaccaattgtcgcaaccattgcattgtttttcttcctctggtggaatgtaatataagggatgatgggggtggcttggatggacaaacggttcagaaattgaaccgcacagtacatctaacttcatatccccacactggtacatgaaaccattggagagtctatcacacgcagtgcagtgaaagtaatcatccttgcttgtaactaaagtaagacgttcattatgtagaaaatgccatttctttctaggagattcagcgcagttttggtgaagaatgaaatcacaaacaacacaaccatagaaagattggagaccaatgggctgggtgcaagcattgcaacgcttgttttcctcccaaagaagagcactaacatggaatcttaggtaatgctctttgtggctgaaatgttgtattgtgttttcatctatcaccacatatggctctacatcttctatctcttcaggcactccttcgagctcttttccgttccacacatcctctctagtagcacatttcgaatgaacgacatagtgaggacaccgctgacaagaatacccgccccaagtccaatccaccttccggcgacaaactccacataccgaattcacaacaccaagaacggaagtgcgagaaacacggtgatcatgccgattgatgtttatgaggcgtggaaggtcaagacactcttgatgtatcatgaaatcacattgcacacatatgtaagggtttctgtctccactcaacccgcaagcattacatgtaaaagaatcaagtcttgggcgaaaggtgagttcgtgagcatgaactttcaaatccataacatattgtgatggtgggtttaaaagacaacacatatccaagctgaagttacaggcagaacaatgataaaacaatctatcacaaatcttttgtgcgcaaagacgacatttaccatcagaatagtccggtggttgacctatgtggagcttaagagggtgtaaagggtggtgagagtggtttacctctgacgggttttttgcctccggcggattccatacgcaatccacatggaaggctaaatcacattcatggcatttgtaaggaaacccatacataacctccccacatttgctagcaccacagtcgaacttgatccctttcttgagaagggtgagcttgtggtgatgcgtctcggaaatatcaataacttttggtggtgggtactttgcacagtatagatccacattgaagtcacagatctcacaatgatagcatagatccacgatcctcttatcacatatatcacatatatggtctggtttactttgaagcttaagagggtgaacagagtgagacgggtgttcaatatattcagaggaatcttcaacacatttcctatgaaccaagaagctacagctttcgcagtaataaccaccactggtaaaaccgaagcgtccacagcaatcagccctagttagataattacacggcatcataagatgctcgtggatcaacggtagtgacacttcctcatattcctcatattccatggtcgtctacaacaagattgagcagaaaaggaagaagaaaaagttgaatctgagatcacaaagctatgctcctttcaagtctatttctctctctaattaaaagtcaatgtttactctcacagatgctcttagtcaggagaaaaacgattttaaaagtcactagccgttgatataattataaacaaagagacaggacccacaataataattgtacattgaaaaagttccattgatataaaatcctataatcgaagtctcagttttgttgtcttaattagcatattttttatcaagataaataattcctcaagcaataactttgatgaacttgtaccttttcattgcagcataatgacataaagcattgtatcatctaatgtaaacaatgaaagcaaatcaatattcaaaacaggaaccaatagaaggttttgttagcgcataaacgcattgatgtatacgagacaatccaagaacattaactaatttgtttgatgaagctttgatcaagaacaaccttgtgttcttcgatgatttcaacaacctcgctcttcactgcaaaatcatctgaacaagatgaagtggagttaaagatcaggggtaatgtcatctcctgtttagacaatgaagaattgagtagtaagacaatcttgaaacccagttatagattggccaccaatggagtctaataccatcaagtgtcctcatgatacggacaccattaatggaaagcaaaacagcttggggggcacacacatactggccgtgtaatttccatcttacaagatgagataatggcacacaaatatccaaatctcaagtctctcaaaaggtagaaaatttggaaatgggcatattctggtggagtaggagaggcaagatgataaaaaagggttatgacgacagtaaagtgaacggtgttagtgacagtcgtatggaccttgtgtctagtgccactaacttgtgtctatcgattcatgtccttccctacttggccgtggtccaactgcattggatcgttgataaagacaaatagactattgtcgacaaagacaaatcgacaattattgataaagatggtgcactaaaataaagttccataagagaaagagacagttgatacattgcccataaccaaagtcttagttttttttgtcatgacaagctttatccgacttaactatacggttaaccaactgttaaaagtgaaacccagttcgaattcagacccgaaactctaaacataaggttaaaaagttggaaaccctttactctggtttcttggaggcttcaggattgttgtcagcgttcgagtcattggtcttcaaggcttcgtcttttggtttattagtttcacgaggactggtcaaattcttctcaatatcctccttctctgtgccttgggcaggtttatctgtgactattgtcagagttgatacctcatcccttgaggcataccaggaatagccacagtcaacacactccaactagatgcaaaaacagaatcaaaatgagattattaggatccatagatttatttgcacagtaagtgaagcttgtacacacatactaccatctctttcttatgtcggttttagcaaattgtatgcattcaaggctagattgcgtattaaggaaaagcatacaaacctgatatcgatctccatgcccagcttggatgatatccctcaggccaaccgtcaattgactgcatctcgagcatcttacagaagtcatctgcatccggaatataaacacaacatagtcacagacgttcacattccctaacaattgaaatccaggaaactaaataaaaacttcaatttccagaaattaaaagacctgcattcgatcagcatcatcaggctccttctttgttgtctcgtcagcagttagaccctcctgaatcccagaaaaaaaactcactctttaatcgttttgacatgtaagataatactcactaatatttgcttactatggaacagaacagcattcagaagagatctgaaatggagtctatgccagtgaaattaaggaaaggagactgaagacaaaaaggggagagactttggctgcagttatgtaacataacaggttcttcacctttaactcagtgggtgacatgttcaaaatcgttgcaggctctaactcgccattgagcagtcgtctagccagcagtgcagtgttctgcagacaaaaccaaatgaaattacaataaaatacttggaagaaacgctgaagtgatttttacaacaaactgagaaccttcacacaggctcacaaatatagacaaactgagaacctccagtaataaaccattcctaaggtattcaaattttaccatgtctcatgaaattcatatatcaactgtcttaaaaacggagcatacaggcacaaactgtatgatcaaagaatcaagagtagaaaattaggggaaaaagtaatgtaatggcatgaatgcagattctataaccttgagattgaaaaccagtgtcctcatcttttggttatatttctgaaaatccgatgcaagagaagcatgtgaagcattctcaagagcacacacttgaggaacagcagcatctggccagagaaatttctcatcctgtcaatcagtttaaacaaaagagttattccaccaattactgaattctaaatagcaggtaatttggtcaattttggtaggaagaaatgtgaaaggtgactgtatgaagagggagaatatttagcgtgataaaaatgattgaaacgtttagctaagacctttccattttccggctttgtgtctttctcatcctgttcaagatgagatgcatctgaacccacctttgcttcgtcgccagcctgtttgttctcagggatataacatatgtgctggactgcctccagaagcttccccaaacacttgtcacgatgagcatcacctgttagtgaatcaaacttctctaagatagcataatgctctgatgaaatacccgcaccacttccaggagtttcagcctttaaagaggcgtcttcctcccttctaacatccacaggacttatgtttactttccgaaaagatcttttggccttcaacacattttcctggtcaacaagcatatcctcagattcaaggtccgggagatcacccaatacgttcatggtctttttgacaagaacatcgatttcacgttgttttgagtcttcatagtctttgtcagtcagcttccacagcttcttttcaacggtatcatagacctttcgtacaataaatccagggttatttttgcgttttggaagttgtttatgggccgggacaaaataaacaacacatctgtgcatcacagattctgctggcacttcatcacgatggaaactgtagaaaagttctcgtgtatcacttgattgccagtttccaccaccccttttctctgcttcttcggggcgataaaaccactgtcccagaatcatcatgcttccatctttagtttgggtaatatcctgtcaaagaagcatgtgtcattatttcaaagcggacgacacaacaaaaactaaaaagatgaatacaaaatttagcacaccagcaccttaataattgcaacatatggtttttgacttttgtcctcaggaaccagcaacaccggaacctcctacacaaaaaaaagattataagagagactagaagtaaatggtttctaaagtttcaagctttaaatcaaccagacactatgaacactcatgaaaaacaagtatacgatcctaaacattcaggtgcaagagaaatcatgatgcaaaagaaaaacttccgaagtctcaagacacggtgcagtcagaactagaaatctaaacaacataagcgagagagaaacattcctctgacacagcaatggatgttcaacaaatgacaacaaccatgagcgtataagaccagttattgacaaaagtttctgttcaaaacccataaaaacataaactcttccagcaaacccaaagcgttgatacatcataatgtcacagagacatcaaaaaatccttaaaaccctagatttcaatatccacaacaatgtaatagcagcaagcaatgcagactcaattgtaaaaaaaaatctcaaaccaaacctcaattccaaatccacaacaagaaaaccctgtaatctcaacatgatcacagcaatcaaaacccaaaattcatcaaactcaaccaaaatcaaaaaccctagagataaaacaaaactcaccagatcataagtgttaccatcataagcaaattggttgaaatgagttcttttcccttttcctttacccgtaacattaaccgaatcaccaacaggacacgcatcatcaggcttctcttcttcttcttcgtcttcctcttcttcagcctccggatttgtttcttcctccgcctgatcatcatctccctccgccatatcctcatcctccttattcccctttctcttcttcttcctatccgcttccttctcttcaaaatcttcgtatagcttcaccgtcttacgcttcctccgtttccccaaagattcctcaggactcgccgagtttcttcccttagacctagtaatcggtacatcgtcttcttcgtcactcgacacttgagcaaatcgccgagacaacaccattgcttcctcttccagaattatcaaaaaattggatctttttatttgtttaatatgagaagtggtttctctctgcctatttataatgttttcacttttcacttttcaccctatctcttttcttttaccaatttagtgagaaaaaaaattgtttacatctatgactatttcgtaaattagtcccttttttaaagggtttactagaaaattttcattgttagcttaaattatttttcttatacaatgaatatgaaattttttataattaattaaataaatgggtaaacttatgtggttaattgattttttttttttgtattttcatcaaatatattaaatgtatttacacaccaaaattatccactaacttgaaattgatgattaaaattaattttatacaaatatattttctaattatttttatagatgatattctactaaaacttatgactgaataagactcctaaaatcagatgggctttataaaacatattgggccggaaaaaaaagtgtaacagacatcatctttgtacccagcacaaaggaaaatggccataaactacaattaatgggcctgaacctaaatgggccgatattctgctttttgataactgatacgtgttgtcttaaaagacacgtgactttaaaagattcaagagacgtggcaaaacagtaatctcctctcttgtaccgctatttcagcgtagaataatctttttcgtagacatcacagattttggacacgtggatgatttattaaccgtgaagattaaaaaaacgagaaatatctggattaacaatttcctgtgaataattacgatccacaaaaaagaatattaaaatcaaggaaaagaaatagtataattgaagaaaaaagctcgaatttaagagaatcacaattaaacccaattcaggaaaaagatttcatctttgagtttttcattcatctatcggttgtttccattctcaggtttcagtcgaaaattccctctctttcttttcgatttgatctgggtttcattgtacatagctcgatcttcaagtttcgtcatctgggtcttgtaaagttttagacttttagggttgttttacttgtgaagtttctctcttttctaatggattctctgggtaattgatcgattagggtttaagattttagcggtggggaaagctgtttggttctagaattctatcttgattaacgtcacttgcagctttctcacaggttttggaattgtactaggttttgattgataatcatagattggtagtgatttgggagtttcttgattgtgtaatcatggcggaggctattggtgctgtatctttggtgggtcatcgaccttcaattgtgaggattacagtgaagaatgaattgaaaacgcagaaatcacagagcattgttcgctttccggtgaaggtagattatagtgcgaaaggtgttctctctcatttgatgacgcagagtgtgaaaaagaatcgaatgtcggtgtttccgatcagggctcttgctatggaattgacgaaagagaagaagaaagacgatcggttaccgaaaacttggaattatcttgattctggtgctgatgataagcctagtttatggcctcctgagaacaaagctgataagccttcattgcataatcctttacttaggcaagagcggatgggttgtggttggttaggtgctatatttgagtgggaaggagtattgattgaagacaatcctgacttggataaccaatcatggcttactttagctcaagaagaagggaaatctcctcctccggcttttatgctcagacgtgtcgaagggatgaagaacgagcaggccatatctgaggttctgtgttggtcgagagatcctgttcaagtgagaaggatggctaagcgtaaagaagagatctttaaagctctacatggaggagtgtatagactaagagatgggtcgcaggaatttgtcaatgtcttgatgaataataagatccctatggctttggtatcgactcgtcctcgggaaacattggagaatgcagttggatcgataggtatcagaaagttcttcagtgtgatagttgcatcggaagatgtttacagaggtaaaccagatcctgagatgttcatttacgcagcacagcttcttgatttcataccggaacgttgcattgtatttggaaactcaaaccagaccatagaggcagctcacgatgggaggatgaaatgtgtggctgtggcgagtaaacacccgatttatgagcttggtgcagctgagctggtggtaagaagactagacgagttatcgattatcgatttgaagaaacttgctgataccgatttgacagagttcgaaccggaattggagatggaaaaggaagatgagcgtgagctgccttcatcggctgtagcagttgatgatttctgatggaagtgatcttctgtaatgttgtacagttttatggatttggattcttcctcgtgtaattcacaaaatgttatagtttctgtgtataattggaacaagttaaacgagggataaatataaaatgtatactcctagttttaatgttgtgtacgttatatatcatttgatttgaacattttagctgatcattcgttcgaaacaacaaacaaagcttttcaatattttagtacatttgattaatttttcaagcttctgagtttgcgaagctgatagtcttgagcgatgattagtgttttaagattcttccattgactaaacgcaaactgaaatgagtcctcagttttatagcaccagaccggtaaaacaagcttctctatgtttggcatcctgagaaacaaaacaaacaaatgagatcctcctcttgtatacgactttaactatgattcattaaataaaagatgaaagttacctctcagcagcaaacatgagatcctctgtttgtacataggaattgaagtgaaagaacaaattcttcgggttcatgcggctcaaacggaggttgagatcaccaagctgagccgcatgaacctggagaatttgttctttgttgacgttttcaaaacatgaacataattttatcaaatgaaacatatagtaacatacacatcttatatatagcagtgtttttatatgtaagaggcacatatataagaaaaatattgcttgtgaaatagaatcggtaacgttttctgaaaaaacagccaacaaatcttttcagaaatatcagaattcaagttcctttatctcatcattccgccaaacctcagcgagataagacaatgagtagcgacaacgatctttgcaaatcatacaatcgtgaggacatgtgataaatttctcaagcttctgagtggcggctgttataacataattgtctatagatttcgctataggaagaaaataatcatacgggtttttgcaatgtgaaacattaagaatcgtgaggtttggaaggccggtgataaacctgtaaactgctatagaactgaccaaaaagcatcgtaaactcaacctcttgaggctatggaggtaagacactatttccctggacgtgtattcttccaaacgacccaaatattttaagttggttaggttactacagctctcccccacagctttaaagtcgaatctcccgctgaaagagtgttcatgagcgatgatcaatgttttaagattcttccattgactgaatgcaaaccgcaatgacttctcgttttgatagcaccagattggtaaagcaagtttctctatatttggcatcctgagaaacaaaacaaaaccaaaaaaaacaaaattgtatgagaggcacgtcattcaagaaaatctgactagatggttggtgaggtttacttctcagcagcgaacttgagaccattttcctgtatataggaattgaagttaaagaacaaattcttgggggccatgcggctcaacttgctgatctcaactaatagattcatgagacttatgctgccttctacttcaaaaaagtcaagaaagaaccgagagatgatcttagtcaaaagattcgtaaggccatgtttatggtcaaccgggtgcttgtaaaagaaaattggtctttctttatccttaaagttgaaaatgcgggagacatctaactcttggagattggtgaggtcgaccgtgttccacagagttttattgtgagaagcaaggaaccaagagatgcagacacgtgaagctcccatggtaatgtccatcacgtcgagcttattgaaaataagttcaagtatgtctttgtttagatctgcccattctgaaacttctcctgaagtactttctaccttc

SEQ ID NO: 118 - DNA, 114759 bp, Arabidopsis thaliana
gaattcgattacccgttttgaaaaccctaattgcaatggggaagacaacgaagctctcctcaccgcaccactgagactggggagtgctcttctctctgtctttacagttttacaggcaggaaattcacagtccactccatgttgccggaaccaattgggccattttataatatgggcctttttagtggatactaggcccattatatccataaagtttataacccaatggaacgcagcttgaagaataaataccatcatgtggggatcatggcgacaagaagaaagagtagccgaaagagagatgaaagggtttgtttagggtccctacgggatcttggtgagatgatatagaaaaggaacggtaggtaggtacttcttgctatgttgtttggtaagctcgtctacttgatctctctttcgacagcaactcaaacacgcatcataaagaatatatagcatcaaggaaatggccaaggttcatcccaagtcactagaaacgggcggggacgcgtctgtgttaccagtttggaagaagttatttatagcgatggtgagattgaagatcgagagagaaaagtttgttagacaatttctcatcttatttgataaaacaatctgtacacagtatagtatatatacaattggtataatgttaaccggtctgttgaaataaataatattctgcataaccaattaaactggtgaatactcaaataaagtttacgtgtgatatcataatagtaagagaaaagaaaacaaaagtagagtccttttgctttattgagattattgacaatatctaattggatcacagctcaaagtgctcttttttttttttttgctaaaaggttaatatcatataaatgaaagatagttttggatttacattttgattaccataagaaatagacccttgccaaaaaaaggtaaaaaacaaggaaatataaagatggaaaagcagaggagtgaagcttcaaacaagccaaagtcccatgagatttctgaactttttccggtgccgcctcgccgtgatgctgtttagtcaaacaaattacaagctcctcgtgcagaaaaaaaaaacatgatttgtttatccatcaacaattagacatgtaaaattgtggtggcatacatgtgcaaatagcaacagaaagttatatatatacttcataatcaagtaaagattagcatctatgatctaacacagattatttttttctcgtcgtcgacatagaaaaaaacttaaatacagattaatattgtgtttatttttgtcatcacatattaccgaaaaaattattgaagtttctaaagccgtaacggacaaaataacaaaagtagaaaaagtgaggaaaagataagaaacttattactgctgatgtcagcactaatttgtgtatggggattcgtaacgaagagagaaacaaaacggaagtctcctaataggccccacctctttcaacaaataaatatcaaccacacgattaatcttacgtcctcaacaactattaacgtagaccgtacgattctcacacgaaggcctctctttctctttctttcttcctctaataagcggcgaaagagattctctgcaacttgttcgattccttactaaggctttctcgatttacgttaatctgagaagagattgggtttagtgaatcttgatttccgtggttgtgtttttcgattttgcttctactccacgttcttgttgttgttcccttttagctccagattatgcttttctttttgttttcttctcttcgacgatatctgccaccaactcgagtctcagtttaatgaaatgtttgtggatttttggtaaatagtactaatgggtatgtttcttttctcctctatattcgttttcttttccgagaacacaagtagtgtctagtgaggcttgctttgatttggtgaataagaaaggttaggattagagcagcttaaatttagggtttttcgagcttgaatgctgtttcctctattactttatcggttgtgaaactgtacgacatttgtttcgaaatctttgctaataaaggtttcatttttcattttttttgtcaagagttggaattgaattagtcttttctacattgtggtcaataatatccgagtctctcgtgatttagtttatgcataaatctgagagtgtgtacgtaatcatagtgaaagtttctttatttattgctatatttgtttaatggagataagtttcattgcttcttctttgtagatcaataatggctacaagaattgagtttagagatattctgtagcagggctaaagaacatcagagatggcagaaaaggagggtaaagcaagtggcacagacaatgacaatcgggtgaaaacgaaacgttcaagtcatagtcgtcgaaaggaatgtgtcaataagagtttggaacataatgatgagcttgtgaaatatatgtccaagttgccaggttatctccaacgtatagagagaggtgaagaaagcgttcatcaaagtaatgttttgaatgttggagtcttggattgggaaagtctacagagatggaagcatggtcgagcaaaaggcggtgaaatatcaggaagaagtgagagaaaagtgtctactattgctactacttctacttcaggagtagtagttcccaatgactcggctaataggtgtaagattgatgaccaagtgcatacttgttcgaatctcggtaaagttaaagcttcccgggatcttcaatattctctagaacctcagctggcttctagggattcattaaataagcaggaaatagcaacttgtagctataagtcctctggtagagatcacaaaggagtagaaccgaggaagagcagaagaacgcattcaaaccgggaatccactacaggtttatcgtcagaaatgggaaactctgcggggtcacttttccgggataaagagactcagaagagagcaggggagatacatgcaaaggaagcaagagaaagagctaaagaatgtgttgagaagttagatggggatgagaagatcattggcgattcggaagctggtcttacttctgaaaagcaggagttcagcaacatttttctccttcgatcaagaaaacagtcccgaagcactctttccggtgagcctcaaatctcaagggaggttaaccgctctctagacttttccgacggaatcaatagctctttcggattgagatctcaaattcctagttcctgtccactctctttcgacttagagagagattctgaagatatgatgttgcctcttggtactgatctttctggtaaaagaggtgggaaaaggcattcaaagacaacttcaaggatatttgatcgagaatttcctgaagatgaatccagaaaggagagacacccttcaccaagcaagcgatttagttttagttttggtcgtctcagccgaaatttcagcctgaaagatatttcagccggccaacctttgagttcttctgaggataccattatgtctggttctatgagatttgatggttcagtttgtccatctcagtcaagtaacccggagaaccagaacactcattgcagatctcgagttagccctctaaggcggtttcttgaccctttactgaaaccaaaagcctctgaaagtgttcttccatcaaaagcaagatcaagttcttccaatccaaagccaataaccaacagcaacgtaccacttcaagatgaaaagaagcaggatgcatcgagaaccctagctatttttcagctcacaatcagaaatggcatccctttgtttcaatttgtggtcgatgataacagcagcagcagcaggagcattctcggggctacaatgaaaagctcagattcatcgttcaaagatgattctgttcagtactgcacattctactctgttaatgaagtcaaaaagaaaaaaagtggaagctggctaatccatggacacagagagaaacattgcgggttcgtctacaacataatcggtcaaatgcagttgggaaactcaatgagcgtagatatatcagagcagaaatctttgatcacagagtcagttctgtttgacgaatcagagcaagtaaaagggaggaaggaggttgcagctgtagtgatcaagaagaagcctgtcgaaggaagctataccagcttcgaggaaactagtgtgataattccaggcggcgttcacagcttccccgagaaaggagcaccgtcgccattgattagccggtggaggtctggagggttatgcgactgcggtggctgggatgttggatgtaaactacatgtcctctccaacaaaacagtcctccataaattcaaccaaagcttcacacttttcgatcaggtaatataaacataacttaaccaaaacctttttctaagattttcctgcaaacccatttcatataaaaaatatgtgtttgcttttctattttttatgccgtgttcttgagagtagtcgttttacatttgcaggaagtgagtgaacaagactcgagtccagctttggcgatgacagagctgaagacagggatctatagggtggagtttggttcgtttgtttcaccgttacaagcgttttttgtgtgtgtgacggtactaacatgtgcttccaaggcaaagaccaccggaaaatcttcttctcctatggctccgccgctatctcccgttggtagagtctaaactcaggacacagatagagagtatctaatgatcgttatctttcttataaattcctaacgttgtatgctcttgtgttgtgtccaaaaagacttaaatcataagagtatacactactattaaagttacactatcaactctacacatatattgatttgcttagagttgaagaaatacataaacaaaaatgttcaaaaataacatttttatatagataaaataattgtctctcgtacaaatcagttcaagcattgtagtgcactggtgaccagaatttttcataaatcaactcaagaaaaatactgaaattttaagaaacaatgatttccaaaaatgtgaaaattgtaaatgtattttttttatttaaaaatggaaaacgaacctaaattacttttagtaagacaaatcaatgttagtcgtccgagagtcatagatcgtaggatcccgagtgcattgcggaagattcgacggtggagatggcaagctcgtttccggagttggcccgttttgaactatgaaagcactcataatcccgtatggtaaatgtgcatccatgtgacaatggaacagccatacacctgcaaatatacaatttcatattcatattaacccatcgattaacatatatttggcgttgatactagatattaaatatatatatatatatatatatatactttataaaaaaaacatgttactaaccaggattattagcgataaatctgaggacaacccatccgcctggtggtacaccaacggtattatgcatttgcgggttaaatagattaagctttcttgcatcacgaataggatcatagttaccaaatccataacctaacacatagaagttgaaaccgtggaggtgcatggggtggctctccggggagattatagccgtgttctgcaaaacgatctcgactgtagaattaaatctaattttcttgacgctagtctttctttccggaaacatcatcttcatgtcattattggtacgttgttcgaattttgtgtaatcaaatttaagcggtggttggttgggaaaatcgtcggtgtagatgccactaatgttgtaaaaataagcctcttgcatagagattctctccgggatcataaaagtgcggttgttgagagaaccagcatacctttgacctaacggtccaatacacttggtgcccgctggacatgggtctaagccaagccccatggttatgaacatcttctcgtccacgtgacgagggactggtgtccagtgtggtccaccaacgaggctagtgatgtttgaggtgaacctatgagcggtggacatgtcattcggcacaggcatcaacggctccgctggcgatgatgatgacgtggcaccctggtagacgattaagcctctggtgggtttgatgtcgggggttggtatcccaatggcactaatgtaagggagggtggccatgtagtactttccaatggcctggtcggcggtgagaagtgcgtcaacggtctgtcccggcgttaagatcatcacatcggtgaggtacggcgtcgagtagacagcatctacagcgacaactgtgacgttgtgattggctattttgaagaagaggtgagtgttgagtgctgcgtttacgatccttagcaagtatgtttttccttgtacaactttgaggttaaacattcctaccaaagccaaaaataaaaataaaagttaattctgttttttgtaaacaatttacaataaaaagtaacttttgattcaagtaaagagtgagtattactattctcagagcaaggatatgaatctccggcgaggccattgatgaggtaagcatcagaaaccggagctggccgtaattggagaagtctaacatctgtgtcccaccattgttcttgcataataaaaaaattcaaacaaagttaattgataattatgaatcctatatatcataatttctttatattgtatatatatataattatatttagtggatatttattaaaaccgaaccaacttggtcataatactcgtcagaatgtggcgtagatcgagaaagttgtatcaacttgtaaaagacagctgtttgaaaaaactatattttttttgagatatgttgcttttactattatattgaatcactataatcgagaattgtcgctgtcacaaaattgatttcgactttgcaaaaaaaagagggaaatacttacgaaaaacgataggaacttccttgtagggtttaggaaaagggtaaggacggccggatcggggacggatgactagagccccgtgaagagtggcacgtagattaacgacgtgtgcgtgccataacaatgtaccttcttgtccagtgatatcaaattgatatgtgaagttgtaacctggttgaatcggacattgagttatcatattcgcaccgtccatccatacgctcttcaactggaaaactccatgcctatacatatatgtgtgaaattaagaaataacttttattaacatctaaaaagtcagtaattagttgatgaaatgatattgaaatcgacttccattataaagaaaaaaaacaatagtaatgagatcaataagttatctaattaccagtggatggttacattgtaagttgagttgttaatgacattaaccacaagagtgtcgccttctctaacgtttatcgttgggccgggaagacttccattagctgccggtattatttgctccttgcataacggtttcaccacgacgtcttggatctgttggttagacgtcgttattagtattgtgttactattaaatgttttttaccggcaaagttaaaaactaaaaatcggggctcatagattagagatccatcaaatacggtattaatttctgaaatcgaggaaaagaaaacacaaacacacgcaattcaacaactttccgattttaagaaataaatgactagtatataaaatggaaattggtaatataatatagttcccacagtaataaaattaatagttaatatttcgaaaattttggttaggttattaaaaaagggagagaaagtggtataagagtaaatacgtggagaacatgttcgacaacagctgctgaggcaatggaagagaagagaagaaggacgaggaacgcttgatttgagagataatgatgaagtcgaggcattgttaatgtaaggataatttgccccacttgtgattttgtgagagactcgtacgcgtatttatagaacgaactaatagagagagatggcaaaactaaaatactatattattattcaattattaatttgccagaaatggcaatctagacacgattgaacacgtcgttgaccaaccaaaaaaaaaaaatagcaaacttccctcagggattagtcattatatactgtaattttctttagggttatgtcacatgttaaaactagtattaatactacctcaaatttatttagttttgttttataaaatttgcttttgtatttttaatgcagaattttcaacaaaatttgtaattctctctttcaacttataaattggaggttatcaaaaaagaaaactagttaattggacaaaacttatgaattgaacaattaaactcatcataagtgtttaaatagatgatataatataaagttaaacaccttttttatgaaacaccccaaaaataaggtaattcgttgcaaaagaagctgttagatttataattatattgtaacaactatgtttttagtttatatacaaatttgattgcactttcagtgttgtaaaaaatatactccatctgaaaagaggttatatatgaaaaagtactttgatcatcccttttttgataaaggatcatccctttttatataacaaaagtgtaatcatttatgcccgaacggaaccaaataatcaaatgtccacccctaatgattgcttctaaaatctaatttattgtttttctgatcacgaacaaatatataactacaaatttaatccaaatttctttgttttcgaactaattcaaccttatattcccgttcttacatgaaaacatttgaagcttacatttagtaattaacattaccatattctatatttttttaaaaaaaaatcttctcgagtcagcggcacacataaacattatacagctaagtaactctgccatgtgaatcacgagatcgatttaatttaaaaggcgaaattgtcatgtgtaccgttgtgcgtgcttagtaagactcaggacttaagagatcaatataaatcaggaaaactaatatacttaatgccagttgcatttgattactgactccaacacatctttacccaccccttacatattaatttataaataaatgtaaagaataaaaacttgattttttcatgtaaatattgatggacttgtcattactcattagctttattaatcaaaagaatcagtcaattatattgtatgacttgccaggcgaaaacaatggattagctaatgataagaaaataattacttttcttttctataacgacatttttcgccacagttgcttcgattgaagattattgggctagatgataaagtttaacccattaggtctaaagcgtatttgtagcccatttatcctttttttttattgttatgaaaaaaaaaaccttatacataaatctctgaaccgatcgttccattaatgcattaaccactatagaatataatgaaaaaaacttccatacattgaatcgcgaacaaacaaaaaaaggggttaactattacctacgattttttttttgtgaacaattattattattattattttttgtgaacaattattactacgatatatttcgaaaatagtgttaaattaacaataaaattatagcaagtatgattcatgacctaacgacacaagtaaccaacagatattatatccgtttgacatttttttttttgccattgttaaatatataaataataatcttattaattttcgtatcatagccagtgaaatatatgtccaagttggcaggttatctccgtatggatagaggtgaagagagcgttcagagtaatgttttgaatgtcggagactcggagtcttggattgggaacgtgtagagaaatggaagcatggtcgtaaataaacacaagaaatatactgaattttaagaaacaatgatttcgaaaaatgtggatacaatgactacgattgatagtcaacagtaaatgtaatttattttcttaaacgaactttgctacttttagtaagacatatcaacattagtcgtccgagagtcatagatcgtaggatcccgagtgcattgcggaagattcgacggtggagatggcaaactcgtttcccgggttggcccattttgaactatgaaagccatcataattcctaatggtaaatgtgcatccatgtgacaatggaacagccatatacctgcaaaaaaacaatttcatattcttattaatccatcgattaatatctaattggtgtaaatactaaacatatagaaatgttactaaccaggattattagcgataaatctgaggacaacccatccacctggtggtacaccaacggtattgtgcatttgcgggttaaatagattaagctttcttgcatcacgaataggatcatagttaccaaatccataacctaacacatagaagttgaaaccgtgaaggtgcatggggtggctctccggggttagtattcccgtgttctgcaaaacgatctccactgtagaattaaatctaattgtcttgacgctagtctttctttccggaaacatcatctccatgtcagaattggtgggatgctgttcaaattttgtgaaatcaaatttaagcggtggttggtcgggaaaatcgtcagtgtagactccagtaatgttgtaaaaataagcctcttgcatagagattctctccggaatcataaaagtgcggttgtttagagatccagctaacctttgatctaacggtccaacacacttggcgttcgaaggacatgggtctaagccaagccccatcgttatgaacatcttctcgtccacgtgacgaggcaccggcgtccagtgaggtccacccacgaggctagtgatgttcgaggagaacctatgagcggtgggtatgtcattcgccggaggcatccacggctttgttggcgatgatgatgacgtagcaccctcgtagacgattaagcctctggtgggtttggtgtcgggggatgccggtaccccgatggcactaaagtaagggatgatggccatgtagtacgttccaatgggctggtcagcggtgagaattgcgtcaattgtttgtcccggtgttaagatcatcacatcggtgaggtacggcgtcgtgtagacagcatctacagcaacaactgtaacgttgtgattggctattttgaagaagaggtgagtgttgagtgctgcgtttataatccttagcaagtatgtttttccttgtacaactttgaggttaaacattcctatcgaagcggaaaaaaaacgaaagaaattatgtttttttttgtaaacaattgtgttgtgtcaattaatatggaagtcgatcatttacaaaaataatttaagtgaagagtgcgttttactattcttagagcaaggatatgaatctccggcgaggccattgatgaggtaagcatcagaaaccggagctggccgtagttcgagaagtctaacatctgtgtcccaccattgttcttgcatgatcaatatttaagaaaacaaattaattaacaatttgaatactatcataatatatacatatttggtggatgtttatatattaaaaccaagccaacttgtaatactcgtcacaatgtggcgtagaatcgagaaagtcgtatcaacttgtaaaagacagcttttgaaaaaacaatatatttgaacaaatattgaataactataatatttagaatttaaactatagtcgagaatcgtcgctgtcccaaaactgatttcgtcttaaaagagaagagaaatgcttacgaaaaatgagaggaacttccttgtatggtttagggaaagggtaaggacggccggatcggggacggataattagagccccgtgaatagtggcacgtagattaacgacgtgtgcatgccacaacaatgtaccttcttgtccggtgatatcaaattgatacgtgaaattgttacttggttgaatcggacattgagttatcatattcgcaccgtccatccatacgctcttcagctgaaaaactccatgcctaaaatatatatgtgtgaaatcaagaaataacttttattaacaccaaaaaaaaaaaattccctaagaagttaattacttgatgaaataatattgatatatataaaatgatttctagatgatcaataagttacttttaattaccagtggatggttacattgtaagttgacttgttaatgacatgaacgacaagggtgtcgccttctctaacgtttatcgttggaccgggaagacttccattaactatcggtatcatttgctccttgcacaacggtgtcaccacgacgtctttaacctgtttcttagacgtcgttattagtattatataaaatagttttttggcaattaattttttagtggtaataaaagttaaaaattaaaaaaaatagtattttgtttaatataggttccactgtaagaaaagtaatcggtaactttttaaaattttatttatagtttatagagcaaagaaaagaaaaggagaaataagagtaaatacgtggagaacatgttcgacaatagctgctgaggcaatggaagagaagagaagaaggacgaggaaggcttgatttgacagagaatgatgaactcgaggcattgttgatgtcaggatatgataatttcctctacttgttgatttcgtcagagactcgtacgcgtatttgtagagatgtggcaaagttttgatgaagtttgcaaaacttttatattataataaaaatattaaattattaatcagccagatatggcaatctcaaacgcgtttgcacacgttgacaaaaaaaatatcttttttctgtcaattgaaatattaaatgaattgtgttgagatgtcgttaacctctacaacacctcaagttttatgctttgtgattaacaccaactctttttaataaaacagagaaaagaacagagactttaagataagagagaaatgtgagaagggaagagagaacacataacatttgttaccccagttcacatcaatagatactatgtctgggccaagtcacagctggggatccattagaataagtaagttacaagacataatccctcagagaaagagtctcacacttgagatctcttctccgtatcccctctgttacactctcaagagaaacataaaagtttacactttttagtggctatttctttctctagcttactttctacattgtatctctctcttttttactcccctcttagctgcgctcacaacatagctctagggcttctccaaaacgctccagttttaatttgaattcacatcgagacaaattgtctttctttggccagtttcttgtgcttccaaaagatgtttaacttaacaagagatgaattacatttaactctagttaacatctcttgtttacttgaacataaggttctcatctttacaaattggatcgtaaagaaaagttatttacaaatgcaaccataatttcaagcaagaaccttgaaccatatcgttggaggagagctgcaagtttcggtatagtaaaaataacccgattacgtacggactgtcttggtgtcaatggtacagactagatgactagaatcattttggtgtctcggtctcctattgttgttttgaatataatgctaatctagtgagtataaaggtaataatgtcgaatttgctgaagccccaagtaaatcgccactaacctccaaccagaccgtgtatacatacataagagcatgtaaagaacatataatcacgatcgagtttcgtcaggttcaccatataataaacaaggttgaaattgaatacaaccccaaccacgtattctagcaaactttcctattggattataaaatatctgatgttcctcttttagtctcctattttagattctatttatgttgcttggcaaagtcgtaaagtcgagatctcgtattacaatgtcaatatatatttttctttattatgtcacatgttaaaactagtattagtactactacctccattttatgcattgtatgactttattttttgttttgtgaaaaacatactttttgtaatttaatacggaattttcaaaaattataatactctttcaattataaataggaaaatattaaacaagaataaaattattttatattccagctgtttagcccatttaggtccaaaaacgtacttctaggcttatagcccatttactctctttttttaagaaagaaaaaatcatatatattcccgaaacgagcgtcccattaactaattaaccacactaaatcaataataatactagaaagtagaaactatagcatttggttaaagcttttacgaaagcatgattcatgaccaaacgacacaagtaactaaaatttctccggtttgacatcttttgccattgttaaaatatagtatagcattaaattattttattaaatttacataccattataaaagatgctaataaatatttgataatttgaattttgtttcataaaaaaaaaaaaaaaggaaattttgaaggcgcgggggactgagcattatatcgccggcgataatgggatgcatttgcttcaagtcttggcgccgatcatcttcttcaccgtcgattacgtcaacggtcatagatgatctcgaaaacgtcagagagtacgatgccgacgacgacggaggacattatccgttgattttccgtgagttcagtttagaacagctgagaatcgccaccgacggtttctccgccggaaacatcgtatcggagcacaacgattcggtaccaaacatcgtctacaaaggaaaactcggcgatggtcgtcgcatcgccgtcaaacggtttcaaagactttcttggcctgatcctttcgaattcatcgttagtcttttttgatctttataatgtttttggttttgctaacaagtttttgatatctatcaatggtggaccttttttcagaatgaagcacaagctgttgggagattgaggagtgaacatatggcgaatttgatcggttgttgttgtgatgacaacgagagattacttgttgctgagtatatgcctaatggaacattagcaaaacatctttttcactgtaaaatatctctttgtccttttttctcttattgatgattgatgatatcttttggtttgatgattaagagtttaatgtgtgtttcaggggagaaaagacccatgaaatgggaaatgaggttgaaagttgctctgcatactgcaagagctttggagtattgtaatgataaaggaattgatttataccatgatcttaatccttacaggattatgtttgataaggtaatgaaagctaaactctgttttgatttgtgtgtttctcttaatttttagcaaatctttattaatcttcaagttgttgaatgatagacagggattcctaagctttcttgctttggtctcatgaagaatagccatgaagggaagatttatagcaccaacttagcttttgctcctcccgagtatttgcgccttggtactgtgatagcggagagcgtcacatttagctttggaaccttgttattggatcttatgagcggcagacatattcctccaaaccatgtaacaatagtggcaaatttttagttgcattttggactgattcttagcttttttatatgtacatgttaatgagatattttgtgcaggcacttgatttgttccgtggcaaaaactatttggtgctaatggattcagctcttgatggtcagttctctgatgaagacaggacagaactaatacacgtagcttctcgatgtttcaagactgaaccagaagagaggccaagtataaagtttcttaaggcgactctttctagacttcagaaacgggccaagttgtgccctattaatgtcaaaagacctatgtctgtacgtgtcactctctccatatattcaagaatcaagaatagtctctcttgaaactacacaaatttgaattaatggtaccaataaatcatattatttgacagcctccatcaaaaaatctgcctgaaaagactaaacctgcaacagagtcattgaagttgactcctttcggagatgcatgttctagagcggatctaagtagtatacatgaactactagagaaactagggtatgaagaagataatggggttggtaacgaggtatattgatgatgtttatttacttgttatctgaatttgagagttggatgttgctgattctgataaatgtgacagttttcattccaaatgtggaccggcgaaatgcaagagaatatggactacaagaagcatggagatgccgcgtttcttgcgaaagattttgatactgccattgaattctacacagaggtaaagaatgtcattgacacactctgcaactctacatcatcgagaagtataaataaaaggacttgattcattctttcattattttttgcagttcatgactggagctcctacggtatcaccaacagtattggcaagaaggtgtctttgttacctaatgactgaaatgttcagcgaggctctaagcgatgcgatgcaagcgcaagtagcttcaccggaatggccaattcctctttacttacaagcggcttgtctcttcaagctagagatggaagctgaagctaaagaagcacttagacatggttctgctcttgaggcttattagtctttgtaaaaaaacttattttgagaaattgtgattacacacaacaacatgtactactataagccaatgtgaataagtgtgtacccattcagattttttaattcaattatgaatgttctttccaattgtttgatatgattgcactcgtgcaaaaagctaaaacaggaatcaaattccacacaaagcaaaagaaataagtttttgagaaaagaaaaaacagaggattttaatcttctttctcagttttcatttgtgtgaaggcaagttaaagtgaaagaaccatgagattacaaatgcacagaccatacatgttaaaaggaaattaaggaatctatttcctctacataatctccgatcatcggaatcgcttgtagccaccatcgtgggtgtatttccggcctctacgtcatctacattggtttcaaccgttgtttgaccaatctcattgtcaactttaaaaaagttttgagctatcgaacgacaaatctcgcaagtcctaaaataaaagttacgattctttgtaaaatctaacaaatgtttataagattaatgaaaagaatgattggttttagtttgcttacttattacccttgatcttgaaccaagtatcggcacattgcttatgaacataacccaaatcatctttacaagaacatccaagaaccattggatctccacattcatgacgactactctctaaacccaaatggcaaatccggcaatctttctccggagaccctctgattgatccagaggctactgattctgtatctgtttcgtcgtccaaatcatcagcaatctcaaactcgccgcaaaagctacgaacagctgagtgaaaatcgtagtcgtaatcacaagaagaactatcttctccgctgacgtcacttggacggtattgacgctcgccggaaccattttctaaatcaatgtgagagatttcgtaagatgacattattcatttgagagagaaagagtgaagaagagacttttctatatgagagattacaagacttttgttacaagtaaacgtgaactcttggatcaagagatttaaaaaagcaaatgaaaattaaggatttttaaaaaaacatctgaagtactaatgtttttgttctgtctgtggaccaaagcgatgaaacattattaacatacaactttaatttatatttgtttatagagaagaagcaaaaaaaaagaaagaaaacattagtacaggctttaagctgataaatactcgattgttcactaatccgcacgctaagtatcatcgtgttatttgtgtttttaaaagaacatgtgtttcgtgttattagctactgttatctatttctgatcgttgatttaggtcttcgtagtaacaaatgtcaacttgttggacggtggagattataacatgcgcgtgggaggcacgtgatggaactaagtgtcgtagtgcggccaccacctttggctctcgctttctctctctctctcttctcatacttctctttcacgccaccattcacttctttcatgcttcttttttttttaattcactaggaaatttttagtaaagtatttgatcaattaattattctaagaattgacagaagaaaaaaaaactgaaaatattatgaaaacgaaaatcaaacaaataaaaacatactgtcttgagacttaagaatcctttttttttcctcgagacttgagaatctttgacagatgttattacgcagtcgtggtggttaccgttaccgtgagtgttggtttgggtggcgtgagtatcacacgctttctcaattagcttttgaggcccattaataacaaaacttggtcttatctgaggtccaattatttatattttttgggccattctaacccatcatcatctttgcaaatcaatgagactttggattttatgccacctaattcatacattaccacaattttttagatatcaatatgcatatgtttagatttaactatttgaaactttgatttggaatgtattttggtatgcatatgtacagagctaagagattgaatccacaaaataaaaatattaatagccgaaattcccatacctcaaaatggacattactaacacacgagctggcagataaaggaaattaattaacgtagcgacgacaagacaatgttagtacaaaagagagataaagaaagaagaaaaaaaacgtgggaattataactacaaacagtgcgtagatcacattcacggggcaaataaatcagagaaaagatttggtgttatccaccgtcttgggattgctgtggaggaggagacgaagaaggagaaggaggcttaggaatataaggattgagaggagttccatgctcaataggacctggttttatcgaagcttttgtcgtcggagttggatccactggaaaattgtaatcctccaaccccactttcatttctgtgtgtgttttcaatatgtaatcattaatgtatacaatgaaaaacatgaaagagagtaacaaggaggattgatttgattaccagaagaagaagctagtagtgagaagcttaggattattacaaccaaaaggaagacaaagcttgacgtcttcatcttcttctctagagattgaggaagaggaggaaacaatgaagaaaggtttcttaaagacagagagacaaagagagagagagagagagagagcaaattgtaaaatgatgtgtgttaatattgggaaataaggccatgtggggttttggatctctgtcttgaatgtgatgttgtgggttaaaatcgagatcatagttattgctctctctctatctctgataatctctgtacaagagaggaaagcatctcaaacagctcaaagctcattcattggttacactttaatgctctccactattatttttcttgtaagccacgtgtcctgaattctctattttccattagcagtgtcttctcgtcgatgtatctatttgatcaccattgaatcattgatagaaacgagaatgagaaaatggaagaaaaaataacaaaagataatgtggatggagtggagagacaaatatggtgaagaagatacagaggttgaagcggcgccttttctataaatactagatagtatgtggttgttgactatttatttcttgggcttttaatgttttttttttaattttttaccttatgtttttgaattacgcaataaatagtgtgtaagagaagagtagtaaattagtagtagtataattaaccgtctaattgagtttcatagcagtcacgtatgaactggtagtaacagaaacgatatagtaaacacacaataatgtattgatgttattgcaaaaacaaaagttagttagttccaatttttaattattttcccccatttaaataattaaatgccaacgaaaaatatagcatttattaatgtgcttttttgtctttagatcgatctctaagcgatattgttgtcttcaaatactaaacaccattaggcttaatgtaagttttgttgccttagattttctttttttttatcagtttagtagtttttacttattcgtatttgttaagaattgtcacatccatacttccagatgattttgatcttcattttgttttcgtgttttgtggacttaatttgggggtttatgatgagtatgtgtaggtatctttttttttttttttttttttgtcaaaacacaactttcattcattaaggcctcaagagaggaaagttgatacaagctacgataatacaacagaaagaaagatacaagttccatgagttttccaaagggatgttcacttttaaaaagtttgcaatggttgaaaaatctgttgaaactatagcggattcgaccatgaagacgagcttcgcgaaatcctcgaccaacgggtggtcatagacggctcgagcaaacaatgcatacaagcttttagaaacaaactccaaagaggaggctgttggataaaaaagattgagaatactacggtaaccacttttccatggaaatgcggttataatgccgttcttcttcaagcttttaaaaatttgagaactatccttgaacttgatgatttgcacatgaacgagctcgataatcaaaggaagcggggatgaagagttgaaaaagctacggtaatcaccgctctgtggagacgggatcatagtgccgttcttcttcactcttttggttttatgaaaaatctctctaggtgcttcgaaaggcagggttctcgagatataattgtaccaacaaagcaacattgaccgaatatgttccaattgttgtccatgaaaaactggtttcaaatatcgacaccaacgttggctaataatggacaaataagatttttgatcaaacctggatttttgcagaaattgattaggatcacacctattggagttgggcttcaaacaccttaaaggcccaaataaatgaatttgccaagacaaggaacttgatgggccgaactggaataggcccaaaatcgaaaaccctagttttcttttggcgtgggcgatgagactttgagtgtggcggctagacgacggcgagcagaagatcggagttgaaagagttatcgccgagggatgtggcactggaggagataaaggcgagagacaacggtaccaattggtttgatggattagggttgatccattcgtcgacaacttcgtcactgggaccaacgattctaaaacccaatgagaacgttggtcgatgagggtagcggagcagctaggcttcatggatctaggcgcaggtgacaggttaagctcgagatcaaccattttcgcagatttagcttcaagcatctcgccaatagcacaacgggataggtttcatcaagagtatccagcagattagaggaccaaatgggagaagaggttctgggcagcctgaaaagtggatctctgaccaccaaaaccgaaagcaaaaaggaagcgctgtggtggtcgggagagtgacaaaaggggacaaagagtttgcgagatgcggaactgagacaagagaattggaggagcttaagtacatcccgacgccggcgagcaaaagctccaccggcgtcggaaaatagattcatgaggatgtcttcgattttcgtgcttgggagagttcacgggtttttacgtttgagttattcgtttatatgtgtaggtatcttgttacttgtttttgttttgctgtttgcattagggggctatatctattttccaatttgtcgctacgttttgtaacctacacatacatctaatacacacacaatataaccctatacatacatctacacgtcattcatgatctcttccataccttatacatacatctatacacacataataaccttatacacacatgataaccctatacatacatctacgcatcattcataccctctatctatatacgtagtaatctagtctcttgcaccagtttagcaagagatggaaattctagactaagacacgtacttactatacataaacgaatcaacgttctctcgttccaccgccatcttccaaatggaacgaatttcaatttccgtgacaatccattttcctccttttttctccagcctctacaacacaaacaaaaaacaaaacatttcagatatcagtttgataaattttttccaattaaaactaacaattgttctactatcataacataaatgttttcttaggcataaatagaggacattatatatcaaaccaatttgtttacttttctactccatcttaacacatcgcatacaacatttatgaagacaacaacatttcaagccctcatcttatgaacacttttttttaacacacttatataagagcagtatctaaaagactaaaacatggtcatggttccaaaaactatactattaattaagccaaacaccatagctaaacagaaaaaaaaaatgatggaaccagagtcttaccttctacgatgatgatgcctttatgtttgtctctgagaaagtgagagaactaaaaagagttttgagttggatattcaagtggaataacatattaagaaacaaaaagcagagttttagacatgtgaaagaaaaggaaaaaatgaatggaaagaattttgaactttgaacgaagatgtaaggggtcatgatccacattttttaatttagaaacaaaattcaaattcatattcataacggtaagaaaatcttaattgtttctaaacacgttcatattttctttcggcgcccaacgttcggttgtcaaattggcagcattatggacttacaatttcgatagatactcattaatatatagttatacttgatggacccgaattggccgcagtatgggcttttatcgtatctatcaaaattgtaagcccgtagcatcattcctgaacaattcgaactgaagcccgtagcttcaaagtcaaacttaaattcaaaaattaatcctacagaacatcttaaaagttcaaactatactatttcaattaaaaaaaatctggtagaattgaactgaaatcaatcgaagtgttaaattaagaatcttttgggagaactaaaagtttatgttgttgtttttgtgtggtcggtatagattttatggattagattatttgtggaagacataatgtaacaagagtcgggacagagcattaatggtccatggtttaaaaacattaaattgaacgcacaaagtgtcagcgagtacttttgtcagtctttgaaataaatgcacccccaaatttatttctatttatctttgagtattgattgagtctctcgttttttatccttatatattttcatttgcccaaaccaagcatttaattatattcgccggtttgttttgccacatttcacacgtaaccattaccaagagtgagaaactacagtatttcatttacactacatgcatctctcgtaaacatcctttatatgaactctcataaagtttgtaacccaaacaaaaatgatctctcataaagttaaaatttaaaatctcgttaaaattcataacaatagattgtgcttatttaattatgtttggacgatactaaaactcttaccagtgatcatgaaacattgatttccttccttcctccactcacattattgggcttatttaattattaggctgcatgtgacgatatatggatatacttttaaataaaccatggttcaatatttttaccattaaaatatcgaaaatctagaattgtttcctgagccaactcactgtaaacttgatttctaataagataaaataagatgctgccaaaggagaaggttcttagagtagaggtcactctctttcaaccttacaaaattcgaatgttttttcaactatgagtcctatgggttttgatcatttttactgaacaaaataaatacataaagttttactataaatacagaagctctgcctaatgcgagcattttttaacttcaccggacatgccacgagcatgttatgggcatttgcacttcattttatctttgaacttttttttagcattttaagaatagctagtaaaaacataatcaatggtagtccactaattaacccattaattagagagatacgagagatcctttttagattccatcttcttccttcctcttcttttcgccaaacaattccacctttattatcttaaaccccacatttcctatttcctttttgtttatagacaataaatatgatttcttcttgcactatattaaaaaacaattatgacctaatctaattatgaaaaataatcaacaacaccttaaaaactttccacttaaaaaacattcatgcatgatttttttctagttatcaaagattagtaaaattcttcatcattacagtattaacaattgaatagatttttagattatcgcaaatttatagtagaaaagagtgggggcaaaatgtcacaatcgagaacatgggggatacaaaggagagaagataaaagaagtgggtataagaacagaaatagcattaattgaatttttatttcccttactcagcaaccactgagattacaagagtgttgtttgagagcgaatcaaggttcctccaaagaaggaagatgactttaattcttatttaatttccctttctccttttgcttcaccaaaatccacacattcatcaattaaaaaacaaaccctagattcttgaaaactggaactcattcacgaatcctaaaaagagagctcctttggttttcttgaaacccagattcttcaagctcagctatggcggtcttcaaaaccctagctttcctattcgttttaagcatcgtgatttaccaatcagtggctgttacagatgtaaattcatcgttttcctttaatgggtttgtgaaagctccaagctttgacaataatgttgctctgtttggagattcgaagctcgttcatggcggtccatcgatacaattgactgactcagtgagtcgcagtgaagggcgagttatttacaagaaacccatcagactgttccaaggtaaagagagaaacttttccggatcattctcaactagtttctcgttttcgatgtctgatgagattggtagtgtcttggcttttataatggttccaagaggtttggatcttaggttgtttggtagaaagggtaataatagttcctctggtttagggttcttattgaaacacaaagttgttgctgttgagtttggtatctccaagagagggaatcatgtagggatcttagttggtcgtcctgaatctggtaaagttagaaagttatcatcttttggtcaccatttcaatgaagagaagagattgaattgttggattgattatgaggcaagctcaaagagaatagaggttcgtttgagtctatctgctgccttaaagccggtggatccattcgtgtcttactctgtagacttggctaagctatggaaagatgggaagtttatggtgggtttaacctctgcaaatggaaacacttcaaagccggtttatctccattcgtggagctttaaactgagacatccttcgatgaggattcactcgcagccgcttgatccaaacgacgtttccaagactgttaaggaaggggagaagacggtggaagttaaggggaaaggaaaatgtatatggagaatccttggtgcattggttttgggggcggtttgtggaacattgggagccatgttcgcgttatacctttggacaatatgcggtaataggcagtcaatggcgatagttcccgaggaatgtgctgacgaaaaagcggatatccttgtaacgaaagctgatgttgttgttgaagaagaagtcaagaagtagtagaaaaagaaaagtttggtgtgtgtgttttagaatgttgtatttgttgtttgtaatgtaaattcttgtgtccttctttattcttcttctgtttgtttttttgttagttgcagatttggtgagatgagttttcacatgtagaagaatcatacaatatgtattaagttaagatcctgaaatcttgatcaatgcaattgtctttttttttttttttttttcatttgaggacaagtcagtggagagacgtgagtgaattgaagtaaagagtttgttccaaaaaagaaagcaaaggggttctcgtgatttctacaaaaatgcatttataattagttgccactttcagacatctttctctctgtgtcttttctctgtcttgaccgataagaaagtgaaaggagagtaacagtggaatgtgtattgtctccaatggtccccttcctcaatctagagatttattgctttaaccagagttcgaatttactagctttcaaagtcactgcttgtaaaccagtgggttcaaattacacagctaagactttgagtgctgaatgtgaattgactatatacacatatatgcataagcaatggttggtatttgatagctgagttgaaaaatcttgcttgtatttctctaatttcctactataattagaatacttaaaacgaaaccctaatctacaaatgaacagaaaagaaaaaccaaaaatgatgtgtatgtgcgtataattaatgaataaatcgttgaattgagccctttatctcagagattgtgctcgtagacttggtctttcaaaccggttaaggccggtttgttcctcagacgtatcgcacacgcaaccaggaagagggttagcataaaaattctcctctaactttggactcatgcctgcctttcctggctgcctaagatacggtgctcctattctatgctgatgcatcttcttaacctttgacgagaaatcttcccaagatatgagtcctgcatcgagccgatcaatcaatctcacgaatctttgcctgaaaaaaccaccgtaaaatgtcagtttagagtgcattgatagtgaaaaagggtttcttttcacgcaagaaacataaaccgtacctatcgggattaatcgtttttctaaacccttcgaatctccggtgaccttgaaccgctttcgccatgtttccatcataagtataagcgaaaatatcgctttcgagtgctaaattgtaatcaagagcagctaatctgttctgataaggtttaatagtcgaaagctcttcctctgtggccaatgtgttgtgaaagaaaacgtttgggaactcttcgtggaacgcagtcatactgttttgcccgtagatttttcctgcaacaatgtagatattggtggtcgaaggaaaccccatcgccttgaggaagacggcagcttcacgcggcgtcatagggcaattaccttcaagacgccgttctgtaccattgatcactttttctttccagtgtggaatactaaacctcatcttctcaagatcaatggattcttcattggatagactgtgattgcatccggtaaacgccaacatatctttctcgtacctataatgaaaatttctgttaattgatgattctctcagcaatcagcatcattcattcattagagagatggagtaataggggtagcttgtaccgcaagtgaagagcgaggtagggttcgttgttttccctaagtcttgaagagagaacattgctcagattctctatatcttcagagtaacgaagagcttcatagtttgcgcgacatcgaagccgctggatggaaggaggcggactgttgttggctagccgagaatcagtgtgattgaatacaatcaccttatgcttcttaagtaacttggagattgagtttctgtaataactcgactgcacgcaaacaaataaaccaatacagagttagataaaatcgttgaataaccgaaagagaaaacagagaagtaaacaaaaattgcaaatggaaatgtttaccttagaccaggacacaggattcttttcaagaggcttaatcgaagcaaattcttgcggtaaatactcgacaatattgacatcttctgctagtacttttatgaaatgtttccagtcgaaaatgtccttgaacgagctgaaaagggagcttaattaaattatgatgatgatgatggtgaattgattgatgatgatggttagtacgtaccttggatcactccagaaagatgaatggtcaagaaacggaagaacaagagttgcgttcatgattttagcgattgccaccatatcacatatctgtgaagaagaaatgaagtgaggattcgagaaaatctcttatactggaagtggaaacatagagaagaagaagaggcttacaccagttctcatctgattcaaaccaccattggcgtgaacaagaaggtaaccattggtttgcttgattggtcctgagcaaagaaggaaaaaaaaacaattaattaggtctgaaatttcttggtttctcggaaatgaagagaagaattgaggaaaacttactttggttcttaggacgagctacacatttctgatagttcccaacctccggttgattccaaatctctgggatctgttggaaacatgtgacaaaagcaaaattagtccacaagaacaacaatttgctaacgaataaaaaagcccaatgggccaacaaacaaattagtgtttacaagctgttctgattgtggttaggctaagaataaatattggattagttgtaattaaataaatgaagtcaaccgctagaaaattcagtggcgaatggagcagagatccactcatgactttgtatttacaaatataaaatcaattatatattttctaacgaacttgagaaaattcctttcacgaacactaatccactaatatgaaaaatacgaaataaaaaaatatatcacttttttgttacttttgataagattcagctccgaattttttgtcgacatgaacagaatctaaacatggttcttcggttttgtttgaaagaagaagaaaaaaacaactcttgttgactctgttcttgagaaattttttacttaccgatgtagtttttggaacgaggacttgaaaggaattggatgattcatcttctctaatgattttctcaatcgttggtctgggatgaattgaaacaacgaattcatgtttctcaacgtgttttctccgtcttccaacgccgccggagagagcaacgatgaggaaaaaagtgacgacgaggatactcaataacgttagaataaaacggccaagattggtcgtggatctcatgttacgagcaatcccagccgtccatttagatttgttctcaaccattagcatccacacgagcctgaattttcggagagagaggaacccgacgaggtaattgtggtgggagccacttggacaacacgataatgatcctcctcctcctcctccgccgcagcagctcgtagcggtttcttcctcgtcggggacgtaaacgactgcgtttcctcctccgacggtgttgacgtgggaatgatcttcttgagaatcagccacgcgccgtcttgttgttgttgttggcgccgccggtagttggctgctgcttgacggattcactggaacgccgactgacatgtgaccgccggggaaaacagaggattctttttgaatgaaaaaatatgatcagaggagatatttaggaatcaacgaagaatctccattgttgaaacttggttttgttcttcttcttttctttatataactcagcgtgatctcaggacgagcagacaaaaacaatctctcttataattctttttttcctctctctttccttcgccaattatatatttaggacgaatatttactcttatatatgtgggggctatatataaagctaagaagtcggtttcatttgatgttaaaaaataaaaagtcgtttttgttttgtcgaaaatataagtcgttttattgacgaaaacaaaagtcgtgttatgctactttgctttgtaattttttttttttttgtatgccactttgttatttgagtttttcttaaattcacatgtaaaatattcgctgttaaacattggtactgtacaaatacgaattttgcttctcagaaattatcagtctcgattttttcccgaggtttttttttaagtaataaaagtcccgaaagtatagtttttttttggttgatagcgtctcaagacatagtcgataattactgatttcttattttaaataaatgtcatatatattttaacggtattggattggttaatattcactgcatttgcctaactagtaactactagacacgtagaatttagaaagcaatagatttgcatattaatgattttgttatttttaaattccatatttcgtataactgtttcagatttggttttattatttgaaagaaattgtatgtattagtcaattgtttgcacgtcacaaagataagtgtcgttagttttatcaaaatttatctcttttttttttttgtcgaaatcaaaatttatctctttactgaaccttttaccaacatttttttttttttttacatttgatatttaacttattcaactaacaaacagttttcatttaaactgacatctctgttattgatacttgatagatatctaagattcagtgaaatataattattgcgataacctaaataagatccttacataatttacattaatattctgtactataactatataaataaattactatttccatatgaccaaatcataacgacataactatttttattcttttgttgggtttagtgatatattaaacctattgaaaattttatacagtatctaataattgaatagcagtagttgtgatgtggtttgctatttaaaaagaaatgtaattctagcagcgctcatcagtacgtagttataaacagagggttattctgaagtattcaaagtccttccaaattaagtatggattttaatgcatcagattgagatatgtatgtcaactttccttttttagatttaagtgttttaaccaaccaatacttactagactagtttacgtagagactgaccaattccattaataatactagcttatacataaaaatagcaagtgtgtttatcatgcaatcaattttccttatttctcaatgttatagaatcctaaaaagaaggcagtttaaataaactcagtagctactagcaatttaattctattactttattcaacaattagttagcccgtcacattactgatcacgcaattatcttttcctttctaagaacaaagtataaaaatgaaatcactatacgctagagattacgtgtagctaatacatatatttttttcttagggtttcctttcgtttacaaatcatacggttccatttcatatatagtgacattttgtgaaggattgattaagctctacatttataaataataattcgttgtcatataaacataatcgattgaactggggcagaaatatgggtaagaagaaacttataataaagccagaaaaataaaatagcaaggataatttgaaacaatataacaacaaaaagctattcttggtataaataaaaaaagtgaaacaatataacaacaatatttacaataataacaatgatggcctttatgtaagtttggagtattaaaagtggaaaggcctttatgataaattcgaacgttgctcgatagttttgtcctattcctacgtccttttcatttagatcttgattaatacgataaccataccgaataaaattcaagtactatacaaaaactaaatgcattaatatacagttacttgcgtttcttaccaagtgagtgaatgagtgttgttgttgttttttaaagagatcataagatcctttttttgtatacccacaactatatatgtgcgaactaaatacgggacgtggcagttccaagattctcgataacaaatagacacgtctcaagaagacttgtttacatgtttaaaaaatactttaacccacttcttagtttggtaaccgttagagttccaccaaagttaataaaaataattattatgaaccttttgagttggtcagtcacagtttatttttgttttattcctattctttacttttgagatcgaattttagttctattgttaaaataaaataaaaaataattgcttaatccggtataatcattgtacataacttataagcttaccgataaataaaccacaaattaatgcgttcttatagctgaattgtttttagagctagaaataattgatatagatagaatttcgaactcactgatttgatacctgacctataggctatagccaagtgatagtaatcaaagaaaaacgttgtgtataggaaactaatttaaagatacttatattaccgtgtgaaacttatgaatttaagatggtaacatacctaagaaaatggactctaaattaagcgccaataattttttttgttagtaactattaaacatatatactgtagttagtggaagaatccacagtctaacattgtgttctggtcttaagagtcaagaccatataacactccgaaccgcgattttccacgttctctcaaccaattctattgtctcataaaccaaacgaaattacgttttaacatttaaaacaacagaagaggaagtggagctcgaactccggtgacgtcaaaagctcaaaatggacaagaatcactagaaacctttggacttttggtcgacattataacacgcttttaaaaatggactcggagactcaaaattgacgacccattctctagaagcaatatcgggacacacgcaaaaatggagtatatgtcaacgtgtacaataatattatatattgcgaatcatagaaagaggttgcgagtggggggccacgcgccattaggtgaaagttccaccgtggaagtctcaagtctctccactttgtttactttgaaggggaagtcaaaatctctcacctacacctgaaaatgaaaactaaaggttcgtagttgggatggttgttgttagccagggttgccaaattcaatatatcccataattccgattcttcattcgttatcaatgtttcgtgtatctcatacgaggaaaaatgcatagtaacaatagatatatagatttgttgatatttgtatatccgaaaaatcttatcgagtaaaaaattaattcaaaagattaaatgaaatctaagtttcatatacggatgttggtcgttggaattggataaaccttttttcttttcttttttctttttgtcaagaggaattggataaacctataatataataactctcatatacatttgataatattattgttataaaataaaatccttgaaagaatagacgaaatatcaaaagtatttgttaagaaaatattatatatgattggtacgtagaatattgttttgtctgctatataatacacaactcgcgtatgataagaacaaacgcgtacggaggttttgttctccgcccccaccgtcatcaccgacacgtccttttagcagctaccctttttttttctccaatttacttttcaattgatttaaaaaccattatttcttggttatgttgtactaaatggaaaatagcttgtgcttagaatttacacatacaaaccataatatgtactactgtttcaactttcatatattttacttatgaatactgatacatataatttgactaaatacaacaaaatttggtaatttcagaagaattaaaacgtatgcgtataaatgttgaaggactaaatggtagattacaagaaactgaggtctaatatgaaatgttctcaagtacggggaccattttgctattcgataaagtcaagttccttgagcttctgtagtgagtagtgacacacatctttggtcctttgaccaaaaaacaccaatatcaactcaatctaggatatcagcttgaagctatcacaagtagaatttgagcaagaatccaaaatatactgattcagaatttatcatcaggagagaatcctctttgcagcatctcatcgtgaatccgaaatgcctcggttaagttatcttgagaaacaaatccattgatcatacaagtatacgttgacctatcgggattgacacctctctcgatcatcttccttagcacaacctcggcttctttcatctgattttgtctacaaaacccatgtaagatcgaattatatgtaaatacatcaggtactaatcctccttgctcctcctccatcttctttaccaaaccaaaagctttgctcatgttttcttctctaacaaaaccatatattaatgtgttgtaactgatgcaatccggcacaaaaccttccgagatcatcttctctaaaaagctttctccatctgaggcattaccagaacgacaatatccctttatcatagagttacaaatcattaccgttggctttatatttttactgatcatttcatcccaaactcgaaatgcctcagccagatggcctttactgcacaacgcgttaaccaaaatgctgtaagatattggagtgggaagtatctcttttgataccatatctgcccatatctcttttgctgtatcgatatcgcctactttaccaaacccatctaacagagtgttgtatgtcacaacatcgagtctgattctcttttccttcatcttttgaaagagctccattgcgttctgcagattcccgagcttacaatgtccatcaatcagtatagttaaagtataagaatctggaaacaaagccctttcagtcatttcgttgaacaatttatccgcttcacccaacattttccgtttgcataagccatgcaaaatggtgttgtaggtaacaacatccatagcacaaccctgctgaagcatttcatttctcaaattcatagctacagagatcataccttttctacaatacccttggataagaatggtatagatcacattgtcaggaatcagaccagcctccttcacactgttaaaatacattaatgccttatcgagatttccactccgagtaaaaagactcatcatcgagctaaagcaaaccaaatcaggaacaacatctctagatctcatatcactgaaaaccttttccgtttcaaccacatctcccttcttacaagcctccatcagcaacgatctgtaggtagtggagtcaggactcaacccggatcttaacatctccgcgaaaacttccttggctctctcatatttcccatgcttacacagtccatttatcacagtattataagtataaacaccaggactaaaccctttgcccggcatagcattcatcaactcaaatgcctcttccatgagacctttactagagtaggcactaatcaatgtattatatgttacaatatccggataaacccctttctcttgcacttgtgataaaaaggttccgactttttccattttaccatctttgcacaaagcattaaccatgatattgagagtatagacattaataccaacaccactccgagaaatctcctgataaacaccccaagccagttcaacccacccgatcctcaccaagctcccgataagagcgttacacgcatcgatagaaaccgtaaaacctttgcttctcagcaatgtaaaagcctcatgtgcttctctaagtttcctagcctgaacataagtcctaatcaacaaatcaaaaaccgaatcattggaaccacaattactaaacgtagaatccaaggaattcacaatctctagtctagaaacaccactcctcctaatcatcctaagaagacaactctgtgcatctgataatcttccactcctcacgagaatatgaatcatagcgcttaaagacaaagacgtatgcttgaaattcggaaaatggaaacctaattgatccacgaatctttgacctaaagttaaatcattgcggcagcggtataaaacctcaacgacggctaaagggtttaaccgaatcaggtggtttctcacattattgttaccttgcttcaaactaaaacaaatcttctccaccaagaaagaatctgaaacagaaaacgaagccgaagaagaagaagaagaagaagaagaagagggttcgaatacgggagatgaagaagttgtcaagtttttgagaggtttaaatcgagtgagagggtcttttacgcgggaaggtattatacggtgaacaatcattttttgtggttgagagagactcaatttgatttcgattgagaacaaaaattgaaacttgaaaacttttacagtagtttggttcatcctccatgagtcggagttgagagaagagctcagagctcagagctaaacgacgacgttattgtgagtctcaatgatccggttttaattgggctgagaatcgaaccatgatggcccaattacatgttttcagaaaaagccttaataataatatcgaatagtgtagggatgtttactgttttgcaaaacatttatacaaaattaaatattgcaatcataatcctataaaatactatgtttgatgcatggaaaattctacaaaatctacaaatgtaagttatgaaaaaaccgaatctactaaagtagtgttaatggtttaacggtttaaagttaaatcatttctatatttaattatcgcatttaattaaaaaaagaagaagaaaacgttgtatatagtttcccgcttatctcaactgttcctcttcctcgacgttcactgtttacaaaccctaagtcgtatcgagattcaattgcctaattcactgtcaagtttcaacgactaagaagaaaaggtacaatatttcgtagcgatttttctcgttttgttgaatgttgttcgttttcccttgtcggattttctccagaaatcgatcggttttgtagtttcctctgtctctaacccaaaaacccctatcttgttttgcgacattagtctatcttcttctgagatttctgttcattgcgtattttagcacatataaacagaacccgcctttttcgttttctaggtattcatgatctatcgattcaaagattgtagatttatctgcatgtacccttttactctatcattgtctcaaaaatggctccttttactttgggtattgatctgtatgtgtaaaacgttgacccttttactttaactcttgtatgaaatgcggattttgaatcgaaagatgtcagacgatttcgagaattcggtgataaacttgaagctgctcatagatgaagagaaaaacaaagttgtattcgctgaggcgggtacagattttgtcgatatactctttagcttttcgactttgcctatgggaacaattgttagattgctggagatgcatcacaagtcacgctcaatagccattggttgtttcaacaacatctatgcaagtgttgtgagtatgggaatgaagcatttcagtactcaagcttgcaagcaaatgcttttgtttcctgggagtttgaatcaggacaaatgtcaaaatatgaagctgaagatagatgattccgaggctaccaagtgtttcatgtgtcctatgtttgtgcgaagcggacaatgcagcaaaggctatagcaattttaagacctctaggtgtagctgtgggaatttcatggatgaggtgattcagtttcaaggagaaggtggccgaggaaatggttctcaagctgaagtatttgtgaggggtgctcatacttcattcataatcactgatgatttgaaagtgcaagttaactctgttgggtcaacgcttaatgttcttaaagatcttgcctatgcagattgcgataagttggttgaaatgattcttgaggtgaatctccaagaggtatgtttcttcttcttctactactgctactactagacttttacccttcatgttcttaatccagtttcttctaaacgttttaggtagcgactttgctggtgtgtttgttcacatcggatactccattgaccgatacatttctgaaaaagaaaagctcacatggtatgaacaggattcataaaaggccgagtccttctctcagtgaagatagagaggaaacaaaagctgatcaaacgataatgctcaatgcgtatgttaggaaggaggaagggaacattctatatgttgaatgtggtgacgactttgttgatcttcttttctctttccttgctatgcctctggaatctgtatgggacatctcgggcagaggaatcatccttggatgcattggaaacttgtgcaaaagcttcaaggatttgagtagtgcttccgcaactgaagcttcagcttttaaatgtgttcttcctcattactacaagtgccagaagcagctgctaaatgatgttgtcacaacccatcagccaccaacttattaccgttttgtatcgttctctgcggatcattttcgagagtaccgtttgtctgaaaactctggtaagcgacttgtgtatgactgggataaactcgtgcctgtgacttcgatagatccgaaaaccgaaggcaacaacactgctgaaacaagtggatttgtgaagagagggacaaagttcatggtgacagatgatctgatcattaatccttcgaactcaacctcaaccattggattcttaaaggagaaacagactcgactagatgaagttgaaattcgagtgatcaatatgacaaaagaagaggtaatatgcttgtcaacgatccctgtttgatatttaaacatacatattcttgccaaactacatccattgatcctatatatgcaatcgcaggccatcagattattgggagcttcaatggtgacatcctctgccttaagcactggtctgctagctatggaatcagcttcaacaagtgatcctaaatgccggttttttaagaagccgaagattgagacagagacttgagaagcaatgttctaaccgaaagttcatgttctttgctagatttgatcactagagaatcttttgcttagcatctgtagaatctgtttcagttactgtattagttttttttggacatcgactttgtctaatcttttgagtagcaaaaaactgtttcagttactatatttgttttttgaacatctactctggctgattcagttactagcatagctttcgggacatggagtttgtctaatattttgattagcatctgactgtttcagttactagtatgtttcttggacatcactttgtgtaatcttttcttattttgaacgatctcttttgttcatcacatcgaaattagtcaacttttgtgatcttggaaattgggttgacccaattcatgtgaagcttaatttttcgtgtatttttaaagaaagttatttgaataaatgcagtgtagggggaagctaaaagggttgttttttgtttattggctctagggtgttgctgactcattttagtcagtgtcaagatttaaaccattcttaattggagccgctgagattaaatatatatgactctaggtctctagcactttgcctggttttatcagagtgtcctcaccaggcttcagttattttgctcttttctttagtctatctggcctaatatggctgaaagttctgaagaaccaaaggtcagtctgagactcttcattgatgaagagaaaaacaaagtcgtattggctgaggctagtaaggcttttgttgacgtgctcttcagccttctgacattgccaatgggcaccattatcagattgcttgaggagcatcgagaatctcaaccaattactgttggctgttttagcaacctatatagaagtgttgccgagatgggcattgacaacttcaaaactgatgtttgcaagcatatattgcttcatccaaggagtgtgagggatctacagtacaaaaggcttatgctcaacataaaccctactgaggtcaagctcttcaagtgtccaatttcatgcaatttctacagtcattttagcacttctcgatgccaatgtggaagttcgatgaacaaggagtttcaagaaccaagagtagtgccagttgcaagcagcatacaaaatgatgttaatggagtattcatcataactgatgacttgaaagtggcagttaggtccactgacgttgtcttgaatgagctcaaatccctaggctccggtgatattagtaagctccgcgaaatgcttgtttatatcggttttgaagaggtaattcatgttttgtaattttgaagagctatatgtatgtcgtacttgaaaaacatgccctgcttctaatgtctaacggttaactcttaattttgttctaggtactaactttgctggaatgtatgttctcctcaaaagctcccttgacgaacactttcttgaacaaacaaaccttccaaggtcaaggtgtgaccaaagtttatgaaactttaagtccatgtatggagacaaatggagacacgtttttaactttggatgtgatagtaaggaagcaggacatggagattttatatgttgaatgcggagaagactttgttgacctccttttcacgtttcttgctgttccgctggaatatgtagtgggaatctctggtaacagctgcagttttgtgtgcattagaaacttgattagaagcttcaaagatttgaatgctgcagaagtctcaacctccaaatccgcgatccaccatttttatacatgtcagaagcagttgctcaatatcatcactgaccaacctccgctctaccatcgctacaactattatagcttgaaagagtgttcgggctcgactcctttgattttgatagatccagaaggtagtggctttgtgaagagagagacgaagtttactgtatcggatgatttgattgttactgctatgaactcgagctcacctatttgcttgcttcagaagtttcagattcacgcagatgacctcgaggtgcaacaaataagtaccagcaaaacagaggtatgcttgtactaatttgtagctacactttttttatcaactagatatttttaacctttttttgtgtaatcaggctacgagtttgctgagagcttccttggtaacatcctctgcattgaaaacttctttaaggaacttgattttgaagaaccccgaggaagagatttgaagaaacagagagagattcttgcaaggttacattttttttcctttctcaagtaatacacttttacttgttctcccttgctttcttgaataacttttgtctctaaatcaggcaatgagtctgatgagagcttctttgttgacatcctctgctttgaattctgctttatggaacttgattgcgaagaagatcaaggatgagacttaaagaaacagagatccttaactatttaagttccacattgttccatcttttctgttttatctgatttttctctggtttctgtagacattgaactgaacacatgttttccagacaaacttggaatcttttttatttctatgaagtgaacctgcattgatgaacattaacagtcctgtcttatcaaagcaatggaggtgttttgtgattgggattgcttgtgtgcgtgacttttatttattcttgatcgctctcttgtgaaaatttgattagattagatgaaaagtaaatttacacgccaaaattatttagtaaagatgaatagaccctaatgaaaattagagaatccaagataatatatctaaagatacaataagatctttttgtaatattaaccatttccttatctttatctctccgagatctttcaccagaatgtgaatcttaaatgtaaatgcacggtatgtgtttttcagtttgtgagacaaggagaagctagcttaaagggttgatcgacaatggctcagagttctacggaaccaaagtttagtttgagacttatcattgatgaagagaaaaacaaggttgttttggctgaggctggtaaggattttgttcaaattctattcagttttttgacattgccaataggaacaatcgtcagattgcttgcaaagcatcgaaagtctgatccagttactattggatgtcttagaaacctttatacaagtgttgtggacatggaacttgatgattttgagactgatgcttgtaagcagatgttgctttatcccaagaacattagggaggctcaatacagaaactttaagctcaacattgacactaatgaaagcttaaagtgttttggttgccgatttttctcaatctgcagaatgtgcagtaatttcaacacgtccctatgtaaatgcggaaagctgatgaatgaggagataagtttcttagaatatgaggaaaatgatgtcgaaggagtatttatgagagacaagtcgtcatttatcataaccgatgacttgagactcacggatgattctactagttctctcttgcaaacactcaaagatcttggttgtgctgatgttagtaagctaagagagcaggttcttgatatcggtctcaaggaggttatgactttgatgcaatgtgttttcacctcaaatacacctttgacggatgctttcttgaagaatcaaagttcaaacacggtgaggaagatttatagaaagctgagtgatgataaaggagatgaagcagaaccagacaaagttataactattgatgctatagtaaggaaacaggacatgaagattttgtacgttgagtgcggtgaagactttgttgatcttcttttcacttttctcgccattccgttggagtctatatgggaaatctctggtaacagtattacaataggtcgcattgggaacttgttcagaagcttcaaagacttgagtgataatgaagtgttatcagcatccaaatgtatgattccgtattattataggtgccagaaacagttgctcaaaataagaactcctacaccacgggtttacttaggacactgttattccaagacactgtcttattctcaaagcttttatttgactacaaaacgtactacaaagcgcatgacttttgtggatccaaaatctgattgttgtggtcggtcaaaagatggtaaggggtttgtgaagagagggacaaagtttattgtgtcagatgatcttattgtaacacctaagatttctagctcaacattttccgtgttgaagaagtttcagattctcacagatgatttggaggtgcaagcaattaccatcagcaatgcagatgtaaaaaacttgttgtatagactaaacccttttctttttttccaacaaaattatgattctttgtacttcaatatcaggctttgaatctgttgggagcttcattggtgacatcctctgctttgagctctgcttttgggaatttgattgtgaagaaaccgaaggaagagaatgtttcatggaacccggtttcaaagaaaccaaaggttgagacttgaagaaacacaaagtggagagaatcctgagctactattgattggtcaacccaaaatttcaattgcttgctagaattgttaattttttttatcatatgttcttgacttgagttgcctacttggtttatttgaaacttaaaacacatttcaagcaaaatcataaacttttgtccccatctagttttcttcttgtcctctttctcagtcaacgtgaaagggaagctctaagggttgtctttgtctgtgtctattgggttttgatgacccatcaatattgttcattcatggggaagctcaaaaggtagttttgttgtttgtttagagttaagtaaaaagtttgtaaatttaagtgcaggctacagtcctggggaagctcaaagggtagggtttttgtttatgactcgttattattgttcattcaatgtcagactttagaccctcttaaaatgagagttgatgcttcagtttcttaacgtgtcgcttctgtttctgagtgttttagaaaagttttctcatctatcttgctttcgtctttctttcatctattacgctaatggctaaaagtagtgaggagcctaagttttctttgagacttattgttgatgaagagaaaaacaaggttgttttggctgaagcttgtagggattttgttgatgtactcttcagccttctgacacttccaatgggaaccattgtcagattgcttgagaatcatcgaaaatctgagccagtaactctgggctgttttaacaatctctatagaagtgttgtggacatgggcagtgattgttttgagactgaagcttgtaagcagatgcttgtgtatccgaagagtgtgaaagacctccagtgcaaaaggcttaagctcaacataaaccctactgaggacatcaagtgttttaagtgctcaagttactgcggcttgtacagtaatttcagcacctctaaatgtcgttgcggaaaatttatgaacgaggagattcagttagaaaacgaggaacaagatttaggccggtttcaagatgatgataatggagtatttgtcagcggtaggtgttcattcgtcttaaccgatgacttggaagtgtcagtcaagtccactgaacttgtcttgaataagctcaaatccttaggttgtgctgatgttggtaagctcggtgaaaggcttcttgatattggtgtgaaagaggtatgttagttagtttattcttcaagcgtttgtgttatcattactttattagttctctcttactatatctgaatcttggactaggtactgactctgctgggatgtatattctcctcaaatgctcccttaaaggacattttcttgaacaagaagattacacaaggtgcgacgaagttttacaaatcgcaaagtccatgtttggagaaaaaagaagatgaagcagaacctgaaaaggtagtaactttgaaagcatttgtgaggaagcaggacatgaagattttatttgttgaatgcggagaggaatttgttgagcttcttttctcttttattgctgtcccgcttgaatctgcatgggaaatctctggcagcagtatctccttaggttgcataggaaacatgtgtagaaccttcagggacttaaatgaggagactcaaatgtcaacttccacatgcgcacttccgtctttctataatttccagatgcaactgcctggtattatcactcaacaacctccggtgtactaccgttacaggctctacgattacaggcaaatgaactatggtttgactacaaacggtaatcgaactacttattaccgcaaagacagaatcgttcgggtggatttgaaggatcccaaatcccgtggcagcgataagtctgctcaggggttcttgaagaaagcgacaaagtgtactgtattagatgatctgaccattacatctatgaactcctgctccacagtttgtttactaaagaagttgcagagtcacgcagacgatctagaggtgcaagtaattagtatcagcaatgcagaggtatgtttctgtataccctttttgatcctgtattcttgaaaggaacttgactgacacttgattttgaattaggctttggatttgttgagagcttccttggtgacatcctctgctttgagcacgacattatggaatttgattgctaagaaactgaaggaggagactgatttatgggacacggtttcaaagaaagtgaaggaagagacttgaagaaatagaaagctagtgagaatgaactctaagtcgattgttgattatgtttttagaattccgcaaaatctacattacattcctcatgttttcttccaagccttatctttctttgtaagactaatcaaattattgttttatggaaattcatcttaatagggttttttaaatgcaggcaaaaacttgcacatctttttgagtttataaagcaacaagcctaaaatctggaatttcctagtacgataagactgaaatatacaaccattaccaaaaaaaatgcatccatatacaaaagtttataataagatccagttggtatatagtaattgggaatgttgaagacatatgaagtgttgatcagaaaaaaataagacttgaagttaattaatggaaaccctctttctcagccagaagacttgaaggcttctattctcctccgttgcccacaaaaacaaaatttgcttcgccgttttcggctccggcgtgattcttgagaagaactgaagtagagagagagatctgaaatctcaatctccgatttaacttggtaactagagaagcttttgattcctattctttcttttgatttgtatttcttagggttccgttcatgtaacttttacagcgacaatgcttcaaattcgtcttcggagggattccccgacggaaactggaaatggtgcgaggccttctccgacggagacggttactgtagcctgtcccgaccatctcgtcctcgccgatcttcctgttgcgaaaggaatcggttccgtgactcccaccaccgtaatcaagcccgtcggtcgtcgttctcgccgtcagctaggcgagagagttcacttctgcgttcgttgcgattttccgattgcaatctatggtcgtctggtaaaaaacttcgcttccttcattggtttatggctatattgatttgccttaaagagtttttttaagggggctcttcttctatatgtgattgaaactttttttgttttgttttggttttgcagattccttgtgatcatgccttttgccttgaatgtgctcgcagtgattccatctgctatctgtaaccatctttaactctcatcgaatttcattagaagctttgatagagatactttagattgtttggtaatctacagagacgcaggattatcatagtttgaactaggcttcgaatttcattagaagctttgatagagatattctagattgtttagtaatctacagagacattttaagatttactaggcgtagcgattatcagactgaaatcttgttgtctcttgtgtgtgtgattactgcacagatgtgatgagcggattcagaagattcaaacaatcaagatgatggaagggatcttcatctgtgcagctcctcattgtcttaggtctttcctgaagaaacttgactttgaagcccatgtccatgacctccatggaagcctattacaagccgatgcagagaaagaagatggtaaccagtcagatgttcagagcacaatgcagcagtcttcagcttcagaatccaccttgcgagctcctttaagatcccagctgcaacaatcccgtgaactaaacaggtcggcgtcatttgcaaagtcacagtctggatttagtcaagtccagaattaccctccagatagcgataactctcgccctcctggattcgaaaccgctagtcctaaaccaggaatccggttcccagactacccccagcctatgaatcttatgcaaccgcccagcttgcccgttccaatgaatcaaaacccgggtttaccacagcagtttggttttccttcgtatccaacaacagagagtggatcatctcaacaattctttaacggtgctcagtacgagatgacaagaacagagagcggcggatcagaacaaagttcattgctcgggtatcccccgccttcaccaatgacgaatctgaatttccaaggatcgtatcctcctccatcatggaatcccggaatggcaccgcctcacacgacccagcaggttaaccggggtagagacggtcaaagttttgggtggccacaagagaaccgtgatggctttgggcaggagtaagagtagtctagtttgaatttgtgcaatgttaaactcgtcgtttgaaagtttcaagtacttttgtttctaaaaactgtgtcgtttgttgttggtctaacatgtaattcgagtaaacccaatttcaaccgagccaaaaccgtgccaaaaattccatcggaaaaaccaaactgatttgggttgaaccaaaggttttacaccattttataggaacaaccatcgtagattgcacccactgtgtcactgtgataaagaaagaactaagattgatattttggtttttagctctttttctttactgttttgggaggatgatgatgatggttattatatgagttgagattttttctaaacaccgccgatgatctcactaatcttaggcacagctatgcttacagacaatatttcacagtctctttattgggattccttcactctacatatgtattcactattcagcaccaagttcaaatttctgtaagcatttattctctagcataaacacacacgaaaatatactattagctagttaagtataaaattatcaaataacttattcatatttgttagttttaaactagaaatcatgtgaattgaactgaaccagttattgataagtgtgtggctatgagaaatttcgtttcaaatggattctccaattatgaaccataatgatacataacaatatttgcaagacaccattatttcacattatgagaatagaagaaaactgagatctaagacactttttcccatgttttctatgaattattacgatccccatataaattttcaaaatgtaaaagctataatcattgtcgtaattttcatgattaatcacaccaatcattatgaccaaccaaagagaatgtaaatgtaggatatagttcattttcttttctttttttttttttacgacaaaataaggtcattcatttaagctaaaagcgggcggttttcttctagagaaaaccagtccggagtagaaaagcttacatgggaaaaaatagaacctcgtgctcttgccttcttagcaagacaatcagcacaaacattgtttaaacgtggaataaaagataaaaaaaaacgaggaaagttaggctttaaagaataaaaattttttaactcagaagaaaaagcgggccactcatcaggagtgtccaaaagttgcgtcaactccttgcaattagtttttttttatcataattagttttttttttttgggtctgctactttttctcaatataagtttatattctacacgtaatttaaagttcccttttctaagtatatactcctgtttaggaaagactaaaaaagcttatttgattggtgaaaatataagtaaaaagcccacattaatggcattgattgcgttgaggtcaattgatggaaataatcacgtcacgtaaaaagttctcgacatagatctttgataaccaacaaagacaagaacgataaataccagcgaatacaattatgaaaatacgcctaacacgtacgaaaatgtatgtatgcacacgcttcaacaaagatttcatgctttgtttggtaaaagtatacgaaaatatatatatatatatacaaagtaaagatagtgttcaagatttttttaattttgggtaaataataagattgattggaaatgttataagaaaaaggaaaacaggagagaatagtgaatagagagaccaaacaacaaataagatttgatggcgtgaattgctttttctgcttttctacttttgcttggctcttagtttttaaatttaaatacgactttagggtaatggacaaagcctgaaaattcactttttgcttcataaaaaacaaaatttgtcaagggtattttatttctttcagctgaaattaagacgtaaatggtggtttgcttgtttttgttgcaaaacgaatagtatatcgtagcgacaaccccatgcaaattgcaaagtgatgcgagtattgacaacaaaaagaagagaagcttagccagtacaaataaagttgttcagaagaaaaacaaattcgtataagcacacgtgtagctggatattctcagcatttacattaatcaatcaatatatacacttcaatctaatgtttatattaagaaattgattgagatttgatagtttttgtatgttttgatggacaacaatgaaaaattgttgtccctctaatcattttttttttttggctgttcgttttttttgtttttctcaaagaacagaaatatcagaatggcagagagatcgatcaacccattaaccataaaatcacagcactgtttttattatattaaaattgtcagactcaatatttaaccttctttcttaaaaacaaaaaatagcgcagatttaatctgacacctgcaaaatatttcattaaatattttaaatttctttaaataataaataactgtttgttatttctcttcatctcctttctctttcaatgtccgttggtaaaagacgaaagtttcagacataacatctcttcccatctctctcccctctaagcaattaagcagacaagacactgatgatatgagacgaagagaaagaagtcttatcactcatcctttcctcttatgaatctctccgccgaccaagctcccgtcaccgccgtcgacgaactagctccgccttctcaaccgcatcgcttatctacatcatgtgatctccacccagaagagcgtttctccggtttctgtccttcttgtctttgcgaccgcctctccgtcttagatcacaacgccgctccgccaccgtcttcttcttcccggaaacctccctctatctccgctgtttcgttaaaagctctcttcaagccctcctctagtggtaccaacaactccaacggaaacggtcgggtcagacccggtttcttcccggagctccgacgtacaaagtccttttccgcaaagaacaacgaaggattttccggtgggtttgagccacagcgtcggtcttgtgacgtcagacttcgtgacgacgaaagaaaccttcccatcaatgaagctgcctccgtcgataaaatcgaggaggaggctagggagtctagcgtgagtgagatagttttagaggtgactgaagaagctgaaattgaggaggatgaagaaaacggtgagaaagatcccggcgagatagttgaggaaaaaagcagcgaaattggtgaggaagaagaggaattgaagccaatgaaggattacatggatctctactcacaaacaaagaaaccgtcggtgaaagatttcgccgggagtttcttttcggcggcctctgttttcagcaagaagcttcagaaatggaagcagaagcagaaggtgaagaagccgagaaacggtgtcggcggaggacggccacagtctgaaatcggagtaggccggagatcaagcgacaccgacccgagattctctcttgacgccgggagattctccgtcgatataggtcggatttcaatggacgattctcgctactcattagatgagccaagagcgtcgtgggatggacacttaatcggcaggacaacggcggctagggttcctctgccgccatcgatgttatcagttgtggaaaatgctccgttgaatcgatcagacatgcagattccatcgtctccgtcaattaaaccgattagcggtgactccgacccgattatcataatcccaggcggatccaatcaaactcgagactactacactggacctccgtcgtcacggagacggaagagcctcgacagatccaattctattagaaaaattgtaacggagctagaggatgtcaaatcggtatcaaattcgacaacaacaatagactcaaattccatggaaacagcggagaacaaagggaatcaaaacggcgataagaaatcgagacggtggggaaaatggagcattttagggtttatatacagaaaaggtaaggacgatgaagaagaagataggtacagcagatccaacagcgccggaatggttgagaggtctttatcggaatcatggccggagatgaggaatggagaaggaggaggaccgaagatgaggaggagtaacagcaatgtgagctggcgaagctccggtggaggatcggcgaggaataagagttcgaggtattcgtccaaagatggagagaacggaatgttgaggttttatttgactccgatgaggagaagctggaagaccagcggtggtagtggtggaggcggaggcggtggtggtggtggtgggtgggagaagacggcggctaaggcgaatagtcacggccactctatagcgaggagggttatgaggctgtattgaccaaagtgtccctcttcattttaattattgggagcaatgtgaggttttggtttggggttctctaattatctttgtgaataaattggatatctacttaaccggagttaatcggaccaaattggaaccgggtcgttttcaaaaacctaaacttataaacactcggagttttgagttatgctctctctcactcactccgccgccgtccctgcttccaccacatcctccgatttatgattggatgggatcatcgagctgattcgattgcaagaatgcaagtaagaacaagagactgattgagaattgtaaaaaccggaaatttgggtgatgctttgaaagtgtttgacgaaatgtctaagagagaagaacaacttgaggtatggaacaactgaattagtcaaggctggataatgactaaggtaacatctttatagtctctggctagcttttgttctctctgtttctcgtactttgcatcaaaaatcaaaccgcattagtatcatcttctcttaacttcaccaactagctaagtctgagttccaggcctttctctgtgtctgcattaccaagcttgcatagagattgaatctttaagtagcttaaacaaacataacaaatggtttttgaagtgagcagcataagcacacacatcggtcttggtggtttgagtaaacatcactgagatttgttgttttacgatgcaatagcaaatgtaaaagtagcttgacgtatcaagcccaagtgttaagtttcaaacttgggtctattaatcaagttatatgatctttgttgctacctttttccctttatttgcttttttcattctctattcaaaatcagccaacctttgcttgtatttccattctccactgtctctctaatctgatcaatcctgcaggttctttgaaagcttgcattcgagtctcagagcgtttgatcacggattcatcactactattctagttgcaatcaaagaaatggtttcactagcggaatctcagcacaacgcttgtgttaaatacaaacccttgaactctgcaaccacaaagcaataaggatagtcgaattcaaaagtagtatcttgtaacctaaactcaagcaaagaacttcaaacttgcttgtttatgaaaaataaaaataatatctgtaaatatgtttcagtaacgagattatcaaacattgcgactaatttcaaatcagaattcgtgattgcagccatcgttatgttttttgtatcatcaaagcgcatgcccggtcgttttcttgtaagtgtaccatttagcaatccaaaggtagaccaagaaattcaagaaactcagaccagctaatagccaaaagaagtaatcaagatgaccattgttgaggttcttagcgatccagcctggtcttccacctgatctcgtgactttagtgaccaatgtcaccagaaatgtgctcagatagttcccaaatgcaattgcggtgagcgacaaagccgagcagagactcctcatagcatcaggagcttggtcatagaagaactcaagctgacctataaacgtgaaaacctcggcgcaacccaccaaaaaatactgcggaacttgccagaaaatcgtcatcgggatagtctcttcattgtaaagattgtgtgtttgaacgtagtttaaccttgcgacctcgaggattcccgcagagaccatagaaaagatggagattacaagcccgattccaatccgttgaagctgtgtgaatccgcgttcgtgacctgtgtatttccgggcgaagggaacaattagcttgtcgtagacaggtgcccaaaacaggacactaagcgtatcgaataaggagagtgatgcggaagggattttgaagttaggtcccatgtgttggtccagtgtgttgccttgtagtacaaacacagtccccatttggctataaaccgaagcgaaaacaatccctgtggcccaaatcggtaagagacggatcagtgctttgagctcttctacttgtgtcactgtgcatagcttccatgaagacgacttagctgctcctttgttgtcactctctgtttccactgctgccttatcaaagaacctgaaatgatttgaagtgagccaaaagttaacctaacaacacaaaattacagaccggacttgcttgtgccttacgttaatattttggtgtgttcgagcttgcggcttcctatgatactgctttcggcgtcttggttctcgtagagaagagattcatcttcaggaattttcactttagattttctgcatgaagccacaatgacttgcagcattcttgtgagaggacttcctcctggtttctgcagcctgtagaagttgcttccggcgaagaagaacacgacggctatagccattgcgacggtgggaacacctaaaccccaaccccaaccaacattcatctgaatccaaacgagaacagaggaagcaatcattgcaccaacgttgatcacaaagtagaaccagttaaagaaagagctcttagactctttctctttttcgtctgtatcatcaaactgatcagcaccaaaggaagagacacaaggcttgatccctccagttccgagtgcgatcaagtaaagcgctatgaatgtaatagcggtttgacccgctgttgcgtgacaggtttctccgctgcaggttggtgttagaccaggaaccgaagctgatatcgtcaatagcgtcattccctaaattacagaaacaaaaaaaaaaagagcaaacagtttcaagattctgtgattttctttgttcacgttgagagcaaacagagcaaagagtaaattattacggcaatgtagatgacgacaaaggaagcgatggtccagtatcgaccgagataagcatcggcgataaaagcaccgatcaaaggagtagcgtaacatgttccagaccagttactgacactcttagaagcagagacgttttccatattcatttgtttctcgagatagttgatgagattagtactcattccatagtaagctaatctttcacagcactcagttcctgccaattgctcatagatacaatcaaatcaaattcagaacaaaaaaaaacgatttggtttttattacaacaaaagattaaaggtttgaacaataccaagaatgaatctgcaagctttccaggttccagttttattcttgttggctggtttcttgtgaatgtcaagagttccatcttttgtgtatatatccttgtcatcttccattgttgtttggtttcgacaagtttaagtgtgacccctgagttttcaacaatgtgagaatttttgacctgatttactgagaaaaaggacaaaagatgacttctttgccaagtaaaatctacacaacgatatttctacgactaattatcggatttagacagataagcctccatatatatatatgtgtgactccacgaagaaacagaattgaaaaacatcgatttattttatgagcaatagccaaagtaatgtccattacatgcatcatgacaaaaacataacgcgttttctagacacaaactgacaaaatcggaagccatacatacatatataatttcgtcgaagaaagctacggatctgaaaactcgaaaacacacaatcgcaaatttcgtttgaaaatgaaaataaatctaagaacactcctcccgaaaatgtgtgattactagtaacagaaattgttcatagaatcaaaaaaaagacagatcaaagataaccagatttaatatttagaaacggttaatcgttggtgaaagattcgtttaccttttctcggggaagcgacgacagagttttgtgccgggatttgaactacacggctgaggaagataaacttgagggcttgagcgtttcgttttgcgccgtgtgatagatatttataaggaaacactctgaatagtgaaggtgaatcaggcagtttcgtgattttaccagttacgtcctcgcatttattatctttctctttgttattttgttgaattttgaataactttcttgaatctttgagaagatgtggggatgctaaatcctattcatagtaatgtatcattaaagattgtggttgtgtaggtttgaatccctttcatttatatgttaaagaatcaaaaattataacaaaattacctaattcctaacaaaaaattgaaatagttatggaaacatatctttttgtttttgatcaaaaggaaacatatctataaacggataatcaatattgtgaacaaaaaaaaaacggataattaatacaccaaataacttatggattctttttgtgattgtgtccagattcatggaacggttacatgacacatcgatcatagaattgaaatttatttcaacgactcaagagaatagcagattgagaatctctgtacaacttttctatttctacaacttctagtcaaaacaaacctaccacacaaaagaagtgttaagtggtagagaaagattaacttttttaaccataaactcacaagaggttaaacaaacctaccacgcaaaagaattgttaatatcctgattagtagaactaataaacttgtttgaaaacttaatgcacacgcattatctgtgacctatatatggaataaacaaaatgcgtaaacaagttgtaatagatgttaatataaccacgaaaaaacaaaaaacaaaagttgagagactatagaactatgaaaataagtttaatagtacttaagaaaaaaaattgatataattttctgttatgttttctcagattgttttctacgattgatgctgtgaagaactaacttgtttcttattgattcataatgaggttacatcacatatatatacatacttgaggaggttacatgtctaatgggctaggttacaaaagcccataactacttaagtatatgaccgacctaagtatagtctccatgggccggacctacgggccggactgactgtggcttctctccatggaccgggccgacaggccgacgggccgatggaccgatggactgatgggccgactggtcgatgggccgtcacaccaatgggctgacggacctatcctccaaagacatgggccacggttatggagtccatccaacaagtggtttacaacactcccccttggatgacataaccgtgtagatgccaacgggatctcagtaatacgctaggggaatgctgcctcattaaaaccttactaggaaaacccttttcgggacaaaaccatagtgaggaaaaagagtacagcacgcattactccccctgaattggtcatctctataagtccttaagcctccgcatcccaacctgatgcgcgagcttcctcaatgtcgttgctggtaatgccttggtgaatagatcggctgaattgtcgcttgaacgtacttgcaccaccttaacttcaccatccttctgtaagtcatgcgtgaagaagaacttgggcagaatgtgcttcgtccgatctcccttgatgtatccttccttgagctgagcaatgcatgccgcgttgtcctcgtatatgatggtcggctccttgtcttcgaccattccacaatcggctcgtatgtgttgagtcattgacctcaaccacacacactcgcggctggcctcgtgcattgccaatatctccgcgtggttagaggaagtggccgtgatggtctgcttcattgatctccaggatatcgcggttccaccatgagtaaacacataacccgtttgtgactttccattgtgcggatctgaaagatatcctgcatcagcaaaaccaactaaaccttctttgttatggttagtataatataaaccaaaatcaattgtcccttgtaggtatcgaagcaaatgcttgattccttcccagtgcctcttggtcggacaagaactgaatctagagaggaggttcacggcaaaacatatgtccggtctagtgtggctagacaggtacatcaacgctcctatggcactgagatatggcatttcaggaccgagaatttcttcatcgtccttctttggaccgaatggatcactatccaatcctaggctcctcacctgcattgggctggtcaatgggtgagccttgtccatattaaatctcttgagtattgtctctgtatatgccctttgatgcacaaggattcctttatctacatactcaagctgcaatcccaaacagaactttgtcttgcctaagtctttcatttcgaattctttctttagatattcgactgtttgggcgatttccccagagattcccaggatgttcaaatcatccacatatactgctattatcacaaatcctttgctagcaaacttcttgatgaagatgcatggactgatggggtcatttttatagccctctttgactaagtactcacttaacctattgtaccacatgcgcccactttgtttcagtccataaagtgatctgttcagccttatgcagtattggtctcgagacccatttttatcttttcctttgagctcaataccctctggtaatctcatatatatctcattatccagtggaccatatagatatgcggttacaacatccattaaccgcaagtcaaggttctctcttattgccagacttattagatatctaaaagtcgttgcatccaccacaggggagtatgtctcttcataatctactcccggtctttgtgagaatccttgtgccacaagccgtgccttatgtctcacgatttcgtttttttcatttctcttcctcacaaagacccacttgtgtcctactggctttatattagatggtgtcctcaatattggaccaaacacatctcttttctttaatgaacctaactccacatcaatggcttctttccacttaagccaatctgacctttgagtgcactctattatagacgtgggttcatgatcctcatttatctcatatgctacctcatatgcaaatttctcgtcgacgtcgacttcttttcggttccattttattccagacatgatgtagtttattgagatctcatcattatcaattccttcaggaccatgagcttcggcgtcccgaatctcatttggtggttccttaggacttgccgcggccatgtctatggtttcctttacctcggttcccattgcacctttcttagtctttcgaggaattttatctttggaacctattggtctaccacgtttcttctgtgggttagactcggtagcaattacattgattcccttctggatatcaatacgtactggtgcattacaagctggtatgtacgatttcacaactctctttgggtcagcaaaggaatctggcaactcattagctagcttttgcaaatgtataattttatggacctctgaatcgcacatcagagtccgaggatcttgccaattcaaggatgtttgattccatgctatctcttttatttctttacccagcttgttcgtctcaccacctaacgcagggaactcggattcactgaagtgacaatccgcgtatctagccttaaatagatcgcccgttgtcggctctagatactttataatggtgggagaatcaaatccaacatatattcccatcctcctctgaggtcccatctttgttctctgtggtggagcaattggtacatatacggcacacccgaatgtccttagatgggatatgtctggctcatgacccgttaacaattgggatggtgaatatttgtgttcactagatggcctgatacgaataagttccgatgcatgtaatacagcatgtccccaagcggctactggaagcctcgacctcataagtaatggtcgagctatcaattggattcgtttaatgaaggattccgctaatccgttctgtgtatgtacatgtgccacgggatgttccacacttacccccatggacatacagtagtcattaaacgcttgggacgtgaattcaccggcattatctagacgtatagtcttaagcggaaaatctggaaaatgggctctcagacgtatgatctgggccagtaacctagcaaatgcttggttcctagaggacaacagacaaacatgtgaccatcttgtcgatgcgtcaatgaggaccatgaagtatcgaaacgtcccacatggtgggtgtattggtccacatatgtccccttgtatcctttccagaaagtttatggtctctttattgacctttgccggtgatggccttattatgagtttcccttgtgcacatgcagcacacgtgagcttctttgggataactctcttttcttttagggtgtgcccctttgaacttatcattagctttcgcatcatgttatgacccggatggccaagccggtcatgccacaaagtgaactcctctatgaactctttgttcattgccaaattatcttcgatcatgttgatcttagtatggtaaagaccagtggacaatgcgggtatagtttctaggactctcttaagtccttgggcgatctctgttatatgtaggaattctctattcccttcaccctttgtttcaacgtggaaaccattaagacgtatgtctttgaaacttaacaagctcctctttgagctgggtgaatacaaggcatcacttatttcaagatgtgtgccgtttggtaagagtacatgggcttggccgtagccctcaatgagactcgctatacccgctatagtgctaatgttggcatttctcaatgttagatttataaaatatcttttgtctcttaatatagtgtggcttgagccactgtccactatgagtatgtccttgtcctcggccatttctaaatgtggacaagaactatatcttaggcgataaagcaaacaataatgaagcaaagcaattccataaaaataaataaatccaagacatcgagcaatagaaatcaaactacaaagcaaagcaaacaaatcaaatttaaaattagatgtctattctcccaagatgtccgaagtctcataatccattaggtcatctttctcgtggtcgaaatccccttcaccatcgagatgaaccaaatttgcttcgggtcccttttgctttatcatctcttgatatgcctcaatgaggtgcttagaggttctgcacgtctttgcccaatggtcgtccatgccacacctatagcacacggacttagcctttcctcgcggtttgttaataccacggcctctacccctacctcggccatagttcccacggcctctaccaccatagtggtttccttggccgtagaaattgccacgacctcttccaccacgtcctctgccacggccacggccgtgagggttacccctatggacgtagttggattccttggtcgcctgaggttcattaggcgctttggccatttcggctctattggcttcgggcacagctgtggatccgggaggtctcaatgcgctgttcatgagtaactgctcattgttcttctcagcaagaagcaggcaggaggctagacttgtgtaagtcgtaaaccctttcgcacggtactgttgctgaagcagtacgttgttcgcgtgaaaggtcgagaaagttttctcgagcatgtcattctcagtcaccttctcaccacacagcctcaggatagagacaatcttaaaaagctcggagttatactcctccacggatttataatcctggatcctgaggttaagccaatcatgttgggctttgggtagttgtatggtcctttggtggtcatatcgattcttcaactcaagccaaagctcaagtggatcctcgactgtaaggtactgatttttcaagctctctgctatatgatggcgtatgatcgagatcgcctgatactttgacctctccgttttctcatttccttccacaatgcactcggcgagtcctttagacttcagctcaatcttggtgtccaatgcccattgaaggtaattgtcaccagatgccaagagtgcagcgtacatgaggtttgtgagcttcgacatctacaatgaagaagttacgagtcaatatcatgtaatggacaaatcataaatgtcatgaagaccataaatcgattttcctatttactcaaggatttgactttctcttttcctctttcccttgggacaatttcctcttttctctaggataatttcccttttctctttaggataatttcctttttctctttaggataatttcctttttctctttaggagaatttcctctttctctagggattatttttctttccctcttgggagagtttcctttttcggtcttagggtaaattttcctttttagcgattttctattttccttagggttttggttttagggtttatgcaacatgaaggattttaacaattcatgcatgcaaccatgaaatcaatcaaactaaacatcctagacaacttcaaacaatcacgaaatagaattagggttttgatccgattatagtgttttcgatttagggtttatgtcttttagggtttcggattctaggttaatatgttttcgatttgcaagtttaggataagcaataacaagacaaacaatcgagcaaacaagcaatcatattacaaacactactcaaccattcgtttttagggttttagccgtttgttagatccatgttcgattagggttctttagctttagggtttaatgaattacctttctcctttggggttgtacggactggaaccaggagctaaagaccttggttatcgaacggtggtcgctggtcgacagttggtggtcgacggaagtatcgtcggctgacagacgggcagcaaacggtcgacaggcggtcagcaaacggtcgacaggcggtcagcaaacggtcgacaggcggtcgacggaacagcggacggcggacgagctagggttgagcggcggcttctagggttttgttaagagcaatgtcgtgctgataacgtgtgaagaactaacttgtttcttattgattcataatgaggttacatcacatatatatacatacttgaggaggttacatgtctaatgggctaggttacaaaagcccataactacttaagtatatgaccgacctaagtatagtctccatgggccggacctacgggccggactgactgtggcttctctccatggaccgggccgacaggccgacgggccgatggaccgatggactgatgggccgactggtcgatgggccgtcacaccaatgggctgacggacctatcctctaaagacatgggccacggttatggagtccatccaacaagtggtttacaacagatgctacttttttttttttttgtcgctacgattgatgctacttagatgaattatttattcgcttgcttgataaggttgtaatatttgctgagataatttaacatcttaaaaccaaaataaatctaacatcagggatcttttagcaaatgttttcacttcttaaaatgcatatgatatcatccacatatgttactgtaatatcatgaatgttttttggtcaaatattatcattaatatatgaccaatattcttgtctattttggtcaaacatagtgtggggaataaatctgaagtagtctttaattgtttggtatgaatttttgggccttaagtattgttatatgatcatatttggcctttatagacccaaaaaaaaaagtatatataaaatttccatgaaaaataaattaagattactctgctccgaatgaaaatgatatatttatatagatcaattaatccactacccacagagaagaagaaaaaaaaccatcgcactcaaatataggttgaacacttttaattgtgaacaacaaattagttcggttattgcttcccaacaaatataatcattttctgttagatgctatcctccaatcagatttcttgaaaggtaattctcaaccatttcattttcacattaaggcttttagatattcatttacctttgttaaccgaaagtttaaatatgaatagttacacgttatcactagatgtcattcattcttgtaaactacgtactatggtgattattactagaagaaagtattgtttttaattagaacatgtttacacgtaatttttacataaatatttagatgtgtttccaaattttaaagacatagaatcgggctaaaaatcttatttgggacatccagaaattaaacttttgaaacatagaaacaagacattgtgatgagaagagtaaaagaaaacataaaaagataccaacctacacttaggttccaacccacaaagagatacatatactttccctctaagctttgaagctttagtttcaccaaactgacgaagcacaagaacccaacatttgcatctttataaggcaatgatcatgaatcattttcgaatcacaaaaccaagagagaaagttgagaaatcatcagtagaagatcaaaagaagaaaagtcatagtatacatttaaagacacatcaaaagcttcaagggaaatggtatttccaattcggattttggttcttttcgcattgctcgccttcccggcatgcgtccacggtgcaatccgcaagtacaccttcaacgtaagtccgcatgatcaatgttatcatcataatatattatatgatttcatcaaggttgtatcattctttttgagtctaaaaaattcttaaataaaagtagtaaaacgtacgtacgtaattatctaaaaataacaggtggtaacgaaacaagtgacgcggatttgttcaacgaaacagatcgttaccgttaacggtaaattcccaggacccacaatctacgctaatgaagacgacacaattctcgttaacgtcgttaacaacgtcaagtataacgtctctatccattggtgagactgtcctcgtatttttaaattatcaacttttcctcccttaattatcacaaaattaacctaaaaattgattttgttggtttgcaggcatgggataagacaattaagaaccggttgggctgacggaccggcctacataactcaatgtccaattaagccgggtcacagctacgtgtataatttcacggtcacgggtcaacgtggtacgctctggtggcacgcacatgttctctggctccgagctacggttcatggtgccatcgtgattctgcctaaactgggtctaccttacccgttccctaaaccacatagagaagaagtcatcatactcggtactaattacaatgacataattatgataaacgttaatttttaaaattgtggttttaacaatttgaatttcccggtttaatgtttaataggtgagtggtggaaatcagataccgaaacggtagtaaatgaagcattaaaatccggtttagcaccaaatgtctcagatgctcacgtcattaacggtcatcccggtttcgttccaaattgtccgtcgcaaggtgaaatactaaattcgatttttaaaactaaacttcactataatcattatttccttaatttgtattattatatgatctgattataatttttgtccttttttataaataaaggtaattttaaattagcggtagagagcgggaaaacatacatgctacgactaataaacgcagcattgaacgaagaactcttcttcaagatcgccggccaccgtttcaccgttgtggaagtcgacgccgtatatgtcaaacccttcaacaccgacacaatcctaatcgcccccggtcaaaccaccaccgccttagtctccgccgcacgtccttccggtcaatatctaatcgccgctgctcctttccaagactccgccgtcgtcgccgtcgataatcgcaccgccaccgctaccgttcattactccggcacgctctccgccacacccaccaaaaccacttcaccaccgcctcaaaacgccacctctgtcgcaaatacattcgttaattccctcagaagtctcaattccaagacatatccggctaacgttccgatcaccgttgaccacgatcttctattcaccgttggattaggaatcaaccgatgtcacagctgtaaagccggaaacttctcacgagtcgtcgccgccataaacaacattacattcaagatgcctaaaacggctctgcttcaagcgcattactttaacctaaccggaatatacacaaccgattttcctgcaaaaccaagacgggttttcgattttaccggaaaaccgccttccaatttagcaaccatgaaggctacaaagctttacaagcttccatataattcgacggtgcaagttgttttgcaagacaccggaaatgtagcgccggagaatcatccgattcatctacatggatttaatttctttgtggttggtttaggaactggaaactataattccaagaaagattctaacaagtttaatcttgttgatccggtggagagaaataccgtcggtgtaccttccggtggttgggcggcgatcagattccgagcagataatccaggtttttatcttattatactagtacataatatctacaacttttgtatagtaatatatatttttcaatttgtaacaatgactatttgaaataatatatatgtatatttgtgtggtttcaggggtttggtttatgcattgccatttagaggtacatacaacatggggactaaaaatggctttcttggtggagaatggtaaaggccctaaccaatcaattcgtcctcctccaagtgatcttcccaaatgttgaaaactccattattattttttgaatcgattaattcgtttcttgacattttaaaattttgatatgtgtatgctcatgtaaattgtcaataaagtcattgtatgatttgttacgctttaatgaaaggttgaaaagaagcatccttttaattaaactcaccaacttttttttgagctgaaatttttttcggacttctgattgatccatagtttgtcctaatttgtttttatcacttgtttaatacatgtggtagataataaaaaatgttcaaaacgcaataccatacttgaaaaaaaaaaatgttagacctagttataagacaagactgaactaattaagtgatcggttagttggtaaaacaaaatagtatttcgaacttaattttcacctaaagtttaaacgtgtctactaatgactcgataaactaaaaaaaacagtcttttttttcttccaaaaagtcgttatcaaagcagaattcatctgtcgtcgaattttgaatgagtaggtgcaatgtcacatttccaatattaaaagaaaacgagaaagaaaaaaacaaaatactcctcataaaacgatagaaatgaaataaaacgaagcaagagtaataaattcgacagaaaaaggagtaatttactaattatagtaagagaatcttgctaaatatagaatccaagaagaagtcactctctgtggaacagaaaccttgtgtctgctacaaatcagcagatgacacttacagtttacgtttcatcatgcatgtgagcgacactatagggagaattcggtattggcttcctttgttgtccctaccttatttaattactcctgataactatttttctgtgtatttcatcgtatcgaaatatccaaatttcattcttcatggctgatttaactagtgtttaattataattatactttatacttttttttggttcttaatcacacatgctttcgggatcttgaatacgaaattttaaaccgtctatcatttgtttcctgaaccgggtattgcaaatagttaaatcttagtcaactattttttcgagttttttttaaaaatagttctgaaagacaaaaatacatgagtttgtgaaaatgtttgacagttggctataataattggttgcaatgctttatacttttaccaaatttaaattattcaattggctagaagtggagctgtggtaccgtccacatgaggtggtgtcgtggtgagacattaatatatgaacttttgttacgatatgaaagcacccgacacatacattcttcgtattatcttgccttatatgaataaacataaaataaccaatactaaatttgaaactgtgatacactaaagaaaatatctttggttacatccagctctggcttctgttcaaagtttttcttttgaatttatttaaaggttaattaagatcaccacctaacccacttgtacaacggttctgcagtttttgccatcgaatcccattgtttaattcgcatatttgtatgatctctactttttttttaaagttaaatagattaattaacaaaatgaagtttatttacaacaaaataaatgaaaagtacaaatacgttaaaaaacaaattgtttgccagccaaaaattaattaaatacgtaattttcgaaggtgtaatattccaacttgtttttgtatatttgtttagcttatggagttatggttgtgttattatatattgaatgggctatttcgtgttgacaaataagctctttagttaaatattattatgttcttgattaaacaacaaattaagaaccggccaaaccattgaacagtcgttttctggtctttttcattttattggttacaccttctttgtcataaaatagaaattatgttatactttctttcatgtatcgacacgtgcatttggttagtcttaatcccatttcaattttatatgatttatcatattagcagaaaacaaatatgctaattatcacatagataagccatactaaaagtatttatctgaccttaggttaaaaaaaatattaaaatatagcttataagaaacattcactactgagttgtcatatttctactggccgacttagattgcaacaactaaaatatattttttataaatcatttgacataggcaaaacaaaaacaaatatctctgtaactttttcctcaattttttcttttaaaaaaacacttttttatacaccttttcctgttgaatgtattattattcctattgatcatcacgtgaaatatagaaaaataaaataaaaaagcaaaatccacttttgtgttttccttttcgtttacgaccaaagagatccactttatgctctcttcattttctccatgtaataatttttctcgagagatttctgaaaataaagtcgtttctttttttttttgccttggtcactcaagactctcttcttcactctctgttttttgtcctcttctaaaatttagagaaaaaaacgaaagttttcaccaaaaacagaggaggagctatgtcatcgtcgacgatgtacagaggagttaatatgttttcaccggcaaacacaaactggatttttcaagaagtcagagaagccacgtggacggcggaggagaacaaacggttcgagaaagctctcgcttatctggacgacaaagacaatcttgagagctggtccaagatcgcagatttgattcccggcaaaacagtagctgacgtcattaaacgatacaaggagctagaggatgatgtcagcgacatcgaagccggacttatccccattccgggatacggcggcgacgcctcctccgctgcaaacagtgactatttctttggtctagaaaactccagctacggttatgattacgtcgttggaggaaagaggagttcgccggcgatgactgattgttttaggtctccgatgccggaaaaggagaggaagaaaggagttccgtggaccgaggacgaacacctgtaactaccaaatttcttcactacttctaattaatgttataaagatttgttctaaaaaaatcgatattttatgttataatactatagaatttaagtttctaagcctaacaatttgtttattttggtaaataattttggaactaaatcttgttttgtggtattttgaggtaaatatatctcttttattaatatttacttgaaattctctgtttttatatgaactcactgaggagaatatttcttttgataattaaaatgcctaggatttatacttttcttacaatttatatctattttcaaatactttcttgaaattatttatcttatgtgaagttaactaaatataatattgatttacttttctttgtttgacagacgatttctgatgggtttgaagaaatatggaaaaggagattggagaaacatagcaaaaagctttgtgacgactcgaacgccgacgcaagtcgcttcacacgctcagaaatattttcttcgacaactcacagatggtaaagacaaaagacgatcaagtattcacgatatcaccactgttaacatccctgacgcagacgcatccgcaaccgccacgaccgctgacgtagcactctctcctactccagccaattcttttgacgttttccttcagccaaatcctcattacagtttcgcgtctgcgtctgcgtctagctattataatgcgtttccgcagtggagttaaatcacttagaaattatctagagtttgtggtctcctatagatttgttacatacattttctacgtacatattactgcagaattgttgtaaatatttgtatgaaaaggtttgtgtgattctgctgtccatatattaggtctggttggttgtaattttcagtgttccgagttttataataccaatatatgatatatatatatgatatatatatatatatatatatatgtgtgactttacatactatattctttaataatcatataattataatgtaaataccgttgactttaatgtcaatgcttggtgtgagtcgctttttcttcccgacaacttaggattagttcgaatcagcatctaattcagtttttttttgttcaaattaaaagtaaaactgacgaaggatctgactattaaatactacttttttacttaatattcttcccatggcttcgctgatcgttcaacataacagaagaattatattccattttcgtggttccatttacctccaattattatcatgaacctgacgggtgttgcgtcccaaatgcttcgagctttcaatttgttttttttttgtttaactaaaaaaaacgaaaagaaaagggaaaacaaaaaaacaacgtcggcttacaaagcccaaagaagaagaaatagttaatgcccattaaactgtgccccaataagatcccttaaaccccgtaaaaatccatgattttcaagcccagtagtgatttggagtgtaccggtgatttggagtctactaaaatgttaaattcataaattgcaaaaagttgtaaactacagtattaggattacgacctcttaaaaatagagatacaaaagagtataatatgaagtcgcaccacatgtttttcatatttcaaattgcaaccaatcgtagagagttataactagtaagacttccatcgccgtacctaaaactagataaaagttgattaaaagcaagtacacttcctttgtcttaacattaaaaccaaaaaaaaaaagtacacttcctttgtcttttcaacacgaagaagatagaaaaccgtaaaaagaattctaaaatcatgtattttgataaaagtcatgcgaatccaacaaattaaagaggttgtagccgccttagttgtgtaaatcgttataggtgtcaccgtgcactaaagatcaattgtataatagacatgcacttgtatgcaaaggtttggatccctcttctcttgcttttatatgtaatcttataaattataaattcacaaaacaaaatttcttgaatcagttcacagttacgaaaacgttatagttaactagaaaaccataaaaacatgtaatggggtagtgttgtaaattcaacatccaacaagtcttgtcggggtaggatataagagagagcaacaaagaaacaaacaatcaaagaccacaatttttctttctcaaacaagacatgttctttgtaccaacttgtgttttaaaaaataaaataaaaagtcaagctggttctaagggtagtttcgtcattgtgataacaatctccatcaggtatgacgtggcttccgcatcagattattcgtttttagttataacctccgaaaataatttcgctaaacatttaattaattattgtgtacctgtttgatttgtgttttaaataattagcatgttgtgcggtagacgtagattagactcggaaatcacaaacccccgtgtagttaactattaataacaaacaaaaaacatcaattgtttagaaaatatacagaaattttgaattttccgaaaatacatgaaaaataaaagaaaagtaaactagacaaaatgatagtatagacttataagtgccttacgcatctaattaaggacatgattcatcgtagacttgatgacctgatcttaggatagccggatggattatgatttatgattcatctaataatatacggatgaattatatcacaaatttcagattagagaagagatgtggagctaaacaagatttacaaggttgacattgattaatttgagtatagagattaataaatctataacgacatatgtaccatgtacttaatgagtgggaattaggggtcacatgcatgcattatgggtcatgtaatgattagcttgacattaaataagtaagttggtgttaaatcaatattgattaattaatgaaaaaggtatatgcatgtattgcttactccaaaatatctgattagtgggaagttaaaaagtattatttcttaccactaagttgcaccattcccagttgataattttatgatcacaaagacaacatctattcacatttatacatgaaaactactaaattgaattcataatcccggaagtgtgtatatatgttgcaagaatatccgtaaatgatgttcttaaaatctgaactccaaaatctttctaggcaacttgtcggtggatgcataaaaccgatatgatgaacaaggtctgaaacaacatttcacgtgaacaaagctctggcacgaagcagttccatttgataaactacattcacacattatgtcccgaaaaaccaataagcgatacctataatgcatgtaactcactgttcatattcgtgagttttcactttttttttccttttctcatgagaagtacttttttgttgttgctggttggctatcataaaaagtactataatctacgttattggtatatctttgtactcgttataactacaattaaaaaaaaaaaaaaagacacaagtattatccaagaaaaacaatccttgtaaatcgaatgaaacagtgaagccgaatctatatggtattgtgggaaatctaaaccttttgtttatatatagattagtgaaagtgatttaaaattgtccctaccattaatatggagaaaaacggtcaaagcactcagttttggtagattttatagatgcattgaacatgcttctaattaacagagttgactcttttttccaccattctcttttatatattagtatatatatccactacagcatgtatatacatttctttcttgaaaaaggaataagtaaatatgaatagtgtacactgaacaatccacttcgaaaggttaatctaagttaactgttacagctagaaaagtttgaagttgcaaatttttaaatattagagattaggatatgtctagctagtggacaacccataggccatagggtaattggtggggtaactttatctaaagctttataacacgacagcaaaagtggaagatgttgcaattttcctcttttattcaactttttcgcttccaagtttcgtgatttacatggtattgatcacaatctgtttttactattgcatttttcttttccgacttcttatggtttagagtcaaagtaaacttagaaaagcaacatgctgtatcacagattaagcgaatgcaaaataagaagacatttttttaagtccattgtgacatgtttagttcatagagtccatttattatttattttcctcactatacagtagacatggtacagtttctcatactacaatcatatctattctgcttttttctccaatcatagtatttattatgcttttaaatgccttcattaatcccttaatgccgcttattaagataagaaccataataccatattccaaacttttaatctttaaactaccgtaaaaaattcctttgattttacgacgatctttttttccaacagtaggagtttcgtataaatatgcaatataaagtcatgctaccttttgaaaaccagtaacatacatttaatataagttgaagacaagtgatgatacaacattattacttaatagcattagtataatctaccatatgttttttttaatatgctgtatgttggcatcaatgccatactttatttgcttcataaatcatgctgattttcttataattttgttttcagtaataacattgtcttatgttttattttatcagcacatgtaaatagttataacaagataagtaatataacttattaatagaatttgaactaaagccattataattttgatatatattgttacgaaaattattaacgttagttgacaatagtatcaatcattttcctcattgtttttgttgttggttatatatgctcatcattattaatcaccacatgaagtgattataactaattgttgctgtcagaggcgaatcagacttgagaataagcaatgattactaagaacaaattatgtaatggaaatgcagttgaattctactactaatttatttccttaaactcaataattgttaaccattgtagtagctgaaatttgggatgcatactaaacaaaaattattgtagttggggaagaaataattaatgatcatgtttcatgttatttgagttaataatggaccatatgataactgagtcattaaatgcttttgttctttgaaatgaccaactagaatcaatgcgaaagacacatatatagcgcatttgatgtcatatatactattattaaattcatatatacatctaacgatacaatttaatttatctatgttatgtactgttatttttcatgattctcagctgataagacattatacatatccaaatcgaatgcttttgaataagtgcacagaagttaatagaaagtaagcatcaaattctatattaacatttccacactattttaatattcattgcatttgcatacatatatatatatatatatgtatatgattctaaaagttttgaaaatagcataacaagaaattaataagtggtaaaaatattaaatgtcatcaaccgttaaatattaactattcaagtaagaaatcgtattaaaatactactatgttacaaatcttcgtttttttttgtccgaaacaaaacagagcttgtgttccccatgcaattaatcttgggatctaaaaaacaagtgaaaaaggcagacttgttaagtttcctatgagatttatattgtcagaggattagattttttgtgcatgagtacatactcataaaattaaagaagaaaaaaagcagaagagtaggtcttaacgctccatctgtttcccatggaagctatctgtcctttcttctccttccgaccgaacacgtcctctccatctttttcttttttccttccatatattaaaacagtttagatgtgacgaaactttataatatgtgttaaagttcgagatttacgatctcatgtcaaatatgaaaaataaagatagagagtaagtacgtaccctgttatataactcttataaaatttagtactgttacgaatgttacgagtctgtgaccacttgaaaacatgacaacaacatcaagttcgactataagatataaacaagtttttaatttggttgttgttggattcaacgtccactgaatatataattattttagatgacattttgtgttttcaattatatttatattaacgatttgtacttagacaaaatgatacatgcatgagggaatctattatattactactattacttagacatatatatatttctatatgcaaaacagaggatactcaaatttcctcatttgtcaaaaatgctggcagatgttatccactacaaataattacacattaggtcattgtaacttactgattttgtcatgtttgtctgttatataaatcgactaactgtatatatagatttgatctaaaccgaataatcgaaccaaaacagaatcaaaatcaatcaaggaagcaagcaaacaaaaaaaccaaaacatttcacacataaaagtccgaaattgggttctttctgattttgatttgaaatttcaaagaaaaaacaaccaaacacacttttacttatcctaaaacaaaacattttgctcgtgaaagtgatgttaacacttgctataaatattcatctagaatttgcatggtgagatatgatactaattgaggcaagaatgtgcgtttgatataattttttctttagtaacaaattaacaatataaatatcaccgggattttcatatagttttattatacaaacctattgtgattataggcttcatagctaaagaaaaagaaaaaaatatgaaatatagaaaacaactaaaataaaaagacaagaatagtaacaactcaagttcatgaatccaaccattgatccgaccactatataaacccctatccccccccccccccataactcctactcatcaccaatacgggcaagttaaacccataactcccaaaatccatatcctctttaaaacatttttgtccaaataaaatgccttcttgttcggtaactgaaatttcaaaatgtatcgtctatccggagaagaagtccaccgtctccgatctccgtctctccgtctccgacctccctatgctctcatgtcattacattcaaaaaggcgtcctcctcaccagccctcctccttccttctccttcgacgaccttgtctcctctctccgccgttctctctcctccactctttccctcttccctgctttagccggccgtttctccaccactcccgccggtcacatttccattgtctgcaacgacgccggagttgatttcgtcgccgcttccgctaaacacgtcaaactctctgatgttctcttaccaggtgaagacgttcctctgcttttccgtgagtttttcgtcttcgagcgtctcgttagttacaacggtcatcataagcctctcgccgccgttcaagtgacggagctccacgacggtgtcttcatcggatgtaccgtgaatcattccgttactgacggaacttccttctggcacttcttcaacacctttgctgacgtcactagcggtgcttgtaagatcaaacaccttccagatttctcccgccacaccgtcttcgattctccggtcgttcttccagtccctcccggtggtccacgtgtcactttcgacgccgaccaacctctacgggagagaatttttcatttcagcagagaggcgattaccaaactgaaacagaggacgaataacagagttaacggaattgagactgccgttaacgatggaaggaaatgtaacggagagattaacggaaaaataacaaccgttttggatagttttttgaataataagaagagttatgatcggacggctgagatttcatcgttccaatctctcagcgctcagctatggcgatccgttacacgagcgaggaatctcgatccgagcaagacgacgacgtttcgaatggcggttaattgccggcaccggcttgagccgaagatggatccgtactacttcggaaacgcgatacagagcataccgacgttggcgtctgcgggagatctgctaagcaaagatctcaggtggtccgccgaacagttacacaggaacgtggtggcgcacgacgacgcgacggtccgccgtggaatcgccgcttgggaaagcgatccgaggctgtttcctctcggaaatccagatggagcttcgatcacgatggggagctcgccgagattcccaatgtacgacaatgatttcggatggggaaaaccgttagctgtgagaagcggcggagcgaataaattcgacgggaagatctcggcgtttcccggtagagaaggaaacggaagcgtggatctggaagtagttctggcgccggagactatgactgggattgagaacgatgctgagtttatgcaatacgtatcagaagtcacttacgattgttgaaaacgacgtagtttctgatacagaggaaaaaaaagcaaatatctaaagtgatagaggaacttaatggcatggcactttggacggttgagatttatctataaagtttttagatatttcgatctgagagttgtgaagcgaacgacgtcttatgagtcaatctactggtcttaatgtgacagtgtattattaatgtacaaaatcccgtctttttcaagtttttctttctaaattaacaactctgtattatcattttagaaacttttatttcttgattactataattgacgttttagaaattaataattgactttggaactatcttaatacgattatttgggggcaaaaaagtagtaatgggacccagcccatgcttgtaagttgtccacttgtaacaaaaggcccaagtttgtagcgattaatgggcctatcgataggctggtgcgtccttgtgcttccagcaactaagaaccggcctcgtacacgttcctcgaacaaaaaacaacaaactaaaacagaattgacaacttgtataacgatcaaaccaactaaacagtttgtgggtgcatttaatttctttgtccgagccttaatagtcacaaaaatagcaagagaaacataaactaatctgctaatcgtttttttacagaataaaaagaaaagaaaaaaacaatagaataaaaacacaaagtatatatctaaaaaaaaactaaaaccctaaaggccaaagttcaaaccaggttttaaacctcctattagacatagacacacatatcttacaatttacaacatcaacctttccatgaacatatataagcaatccaagtataagataaacaccattaatcaaacagaggattttcagtaaatgaaaccatagactatcaaatcttcacattccataccaaatcctcgtccactgctttttctacacgttaccttccggtactggaaacagtcgtttaatcaaccaattgattggtcccaaaacatgaactttctttttcctccagaaccaaatcgctgcactgtactgttcattgcgtatctttgtcgttgctgctctccaatcatatttctcggtctcttctcttgccgcttttccaatgatctctcttgtttcacggtcgtgcagtaaagttctcagttttgtcacgcaatcttcaacatctccagggttgaacaaaaatccggtttttccctcctgatgaaaacatcagaatcagaaaaccacaagctcaatataggttgacccataagaacaatcaatgcaagatcattttgtgtaccagtctatgattgaataaagtttcagttcggttacagctcgcttataagaaaattggcagaaattgttttttcaaccatttcggttcggttgatatgctcatcaatatggtttggcagttaattgtaattcagataattcactgacctgatcttcagggattatatcagggattccaccggcacgggccgcgacgacaggaagtcctgaagacattgcttcaagaaccacaaggccaagtgtctccgactctgatggcatcacaaacacatctccacttgcgtaagcttgtgagagttcatcgccttgtaacgttccagtgaaaaccgctggcattccggtaaacaacttctcaagatcctctctttaagaaaacgaaacagataaacaaaattacaatgttgttgactagaaatcttcagataacaatatggccaatctttaacaaaactagtacttgtatggtccatctccaatgaaagcaatccgagcttcaggtaatttgtccattacactgcacacaaatttctcaatatcaaaattcgatacaccacttaaaagaagtgagtccagtttatacaaaattctaacctctttaaaagctccaaactcttttctacgccaatgcgacctacatgaatcactagtggcttttctggttcgccattactgttaattacaaaatattaaacatcaagattagcgtggaaagtatcattgtttttaatgcatataaaagaaacgtatattctattcttgcctcagtcttatacgcatttcttgagaacggaaacggggattgaagctttctgaatcgacacccttattccaaagtcgaagttgattagcttcaatatatgaaaaaaagaagaagaaaatgtaagttttgaacaatcatagagcttgtacaaaaatgtaatgtatgatctttcttcacctgcagttgcaccagctgctataagatcttttccaatggcagcagaaggaactaatgtaagatcagccgctctgtgaaggaaccctgataaaagcatattcaagtttagtttcatattatacatcacaataaaccagaaaaagaagaaggaaattttgacatttgaaaagcgggttttacatacttattatagaccacattggttttaccaaccaactaaaagtgtatcttgggatgtatctgcacatcaacacaagcttaatcttagacaaaaatttttttataacaacattgtgaaatgaggcagaaaaaggtacttacacagggacgtgtgtgtggtaagacattactattggtacagatagcatttttgctattgccagagcaccaaagacctaaaaattttagtcagggaaaaaagagagtcaagttctggattctctccagttcactggtcttgctaatgttttagtaatgtgaattcttgagggatttaccataactccgggagatgaagcgtgtataatgtcaggcttaaaccgtgcaatttcagagatgattcttggactaagcgcaagcgagagtggaaccttttggtaataaggacaagggaagctacagaagagaagaagaaattagcgatattaccaaatagagaacatccagtgagtaaactaaatggtgctaccttcttgatccaatgactctggctccataaaactcttcaggaacaccttcatgtgtcgtcacgactataacctatgaagcaaaaaagttattaaaaaaaaaaaaaaaggaacagttaacacttgtcaagtaattctaattctggaaacagttacttatgagctgactgaaaagatacttaagttgaagaatgagatagtaaaagaagaaacctcgtctcccatttcacggaggtatctaatgaaattctggaatctgtttttgtagccggatacatagctgcaacaaaatcaaagagagaatcacttccaataataacatgacatataataaaagcttttggtcaatggatcggtgattccgagaatcttgggatattcacaactaaaatctgacaactttgactcaaacaaatcctgaatgtaattggttttaacgatctactatataatttgctaaattggtggtgtagcaaattcatacattagcgagtatctcttcataaaataaatgtaacgatcaaatcgaaagaaaaaaacattacaggaaaaagtcaaccaaggaaaaaaatgagtagaatctgttttcacagagacatttcgtcgaacacaaaacaagcaaaaaaagaacactgtgaagaagacttacgcaaagggagaaggctcaacaaagagagcaattctcctaggcttagagagcgactcaggatcgagaagcggcgcatcaatctccgattcgtcatcttctctgacttgagtaatagtcatatcgttggacccagaaacagcttcctttgtaatcactccacagaagcggagcttgcttttcttgctaatgggtaatctccggtgaccaaacgaaagaggggaatgaagaacaaaagaagaagacctgggaggagaacaagaggttgcagaggaagaagaacaagtgttagtcgtgctaggaagcaaatgaggaggtatagagagatttatagaagaaagagtcgtcatgactcctttttattttgacagagaagcttaaattaataattatatatttgtgaggatttgggtgtcgtcgtcgttataatcggatttttaacaaccgtcagagagaatctgaagaagacgaaagagaggtatatcctctttgtgaggcagagacagataagcatcctaatactcgttttagcatatgctaaaatttatcttttattaatattacagaagttatagaaaaatcgttgttgttataatggtttatgcatacattaggggtttaaacacttgagaaaacaattactacaaaaaaaaaaaaaacacaatcacaataacgtactcctgacaaaaaaaaattgactttgtaattatttggtcaaaatacttttcgttacgtatcatatcattagccgcgctaattacttgtagatcgatataacataaaactcaaataattacgccaagacaaccttatatatattctttatatatatttatataataattttttttatattgcttataaatacaaccaaaaaaagagaaagaaatgtggaatcggaaatctattccaatgaatattcgcttcacataattataaagcatcttgtcttatattatacaacacaacacaacatataaactgcttggctgtcccatatgcatatcattgcatgtgaaagatctaacttcattttctcgattaccaatattttatggtttttaatctttctaaagttagaacgcaacatacaaacgtagtgtgttcctcggagaattcaaatcttacataatttactcaatgccaacatgattgctttcaatatttctcttggtttatttgattgtttcgacttttctaatagaaaatctcaagacatgatgatgcaaaaatctattacactaaatgccttatatgggcccatatatgaatggatcctaatcgggctaagttttctttgttccttcggcccaaagatgacgaggtacacaaaatatatggactatgacattcgtctcaattgagattaatgtacttcaaatgaaacttccaaacaaataattgagatgaacttaacctgagttatttggattggttagaaaattgtttaactgttattacatctaatgttgaactaaagtgatattgataagtctctctatattcaaacttctcattcaaattttcttgtttgacataatcaaacttctatatagtgtcttagtatatatcagagccggcccaataaattattggaccttgtgctatgctccaaatttctttacctaaaactctaaatatttaaaaactaaatcctattttgcaattatttgaaaatttggaccctaaaatataaagaaaaaactgaataaagaagtgaaacccggtgcactagcacactcagcacctcccaagagccgggcctgatatatatctcaaaacttctctatatatatgcctatgtttacacataaagtattataatgaatggggaacattgggggtaggacccctaatatttcacctaaaaaaacaaagctctcacaacagtgacaagaagagaatcaaccttttttttttttttgtcttattgatttatttcatcatacatatgagaatttatctacctaattacttatattgttattgttgaatcttcgacttcaaacctagatttattccaagtactcaatttactcttttacttcaaacctttttccttgtcttttcttttgactataattttggttttacaaatcgcatcatcttcgtagaaattctacaagctataatggaaaaaaatcaagaatcaattaaacaaatctagatattggaaaccatttcatatcaattggttaaataacttacgtgtagttgtacatgtataaacaagtaacttgttcaaatttccttccttaataaaattcctccccaaacattatacatgacttgcccccataaataaatcttcaaaatccctcacgtctccattttgtttctctttttctctctgtctctctctcgataaagtttcagacaagaatatgtctcgaagagcatccaaaagagtacgctttagtccggacccagaagcaaacgacgaactgatcttcccaacacacagctcatcacggcatggtcgcaggagggtcgttgttggaatattcagtttcagcttcagtgactcgccggcaacgacgaagagattactccgcagtattggagacagagttggcaaaacgtttcgttatatatcattcggcaggatgaacaccaaaacgacaccgtcatcttccagtaacgtttcttcgtctctttatttgatgaagtcaaagtctctaaacggatcagagtctcaccgtgcagaagccattgaggactgcattgagttcttaaactcttgctcttctttgtcgagatcaaactcgatctctacctggtctcgctaaacgatttttattgtttcctttgtaatgtaaaagagttgacactgagagttgcataggtgatcagttgattaaagtcttatgtttatcgattcaattattcaactagctagtgactactaaaagttataattcctcaaatcttaatccatttttttttttcaagtttcgttacaaactaaaaacgaaaaacgaagtgggccaatttagaattcaaaaagaagggtcgaaatcaaaggaccataagactgaaaaagcttcttcttttgttgacccaatatttgatttcttcctagcagtattaaacaaaagtaataatataatctcttattctataaaaaatataacctcatcataacaaaaacattaagcgttatagaaattgtaggtccctgaatatatcattacgacaggctacagaatccaatgaaaagtttgttcctttttcttttttggtatcaccttcttcaagagttgaagctttgtgctgaagctttcttgagctcaagagctcgtttataaggcggtgcgatcggaggttgaatcgggtccaaactctggtatgatgatccatctgcttctctagggagtgggtaagaccggtctgagtcataaccggttaagtcaccacatgccaagaatggtatataaactttgttgggtccttcaagccaaccactactgcaatctgcagagtaccaagaaaatacaaaatctcaagcacaataataacgcaaaaaaaaaaagaggttaaaatattctctttctgaatctgacataataatacttaagaagatttctttgtcttgcccaaaaggttaacttcacatgaagagagagcattttttaggtgagagttaggttgaggaagagtaaattgaaagtgtactactcaacaatgcataagttagttgtgtctaactagaagagcttcagaattttgaagctgaagccaagagatttttaccgagatcgcttccacctgaagggcttccgactttctccaagagacgatgcagatctctcgggttaaatccttctggcggagagtaattctcgcagactgcaaaagcctctatagaaacagagtggagaacatgtaatcagaatctcttttaaaaagcaacatttacgtctttgatgattaaaccttgagtaagcaaatcatatttgcacatgtgaaagttctattcttttacctatacttgaattgcggctgcttttcggtttcgcaaaagttacggttgggaaaaacaatttcagctacaaataaaaggaaataaacttatcagtaaaaacaacagttaatttcatcagcaaaacatctaaacttacttgacagtagagagtactgagtagagacttgtatctaacttgacagtaaatttcatgagcacaacatgtaaacttacttgacagtacaagagacttgtatcttttccacggaatatctttgcaataaattttccaccttctttaagaatatgagttacaatcgttaatccctggaaaaaaaacggattgtttgttattgtcattattcatgaaaatatgcttcaaattagtgctaaattttgttcaaacatgacatatcgatcatgtatatacatagatataagaaacttactgctagtatgagttgggactggacaaattcatccatgtcatgcaaaccagtaactgcaaaccaaattgtaaaaggcgttttttatagcataacgtatatattgaacggcgagacagacactttatctactgttttaccatctggagcaccatcacagacaaccaggtccgctttgcagccgtcaaagtgtctaatgaccttgaaaaaaaacaccggaaaaggtaagccatggaaacaaacacaaacttgaagcataattaaagaggaagaaagagatgtagaaaaatttatgagataggagtcgagaaattttaccacttcagcagtccgagcattagttatgtccccttgaacctggatgacaccttcaattggagccataggctgcaaatcgatggctactataagaggaagatccccatctctgcatagtgtttcaacagtaacaaatcagttcaaccttgtcaaatagtggattactaactagcagattaaaacaactaaagaaaaacgatggtggaagagaaacttactttgactcagctgaggactttgcaggaagatataattgacgactcaagacctacaaatgcagtgcactgataaaattcaaaacgtgtttctctttaacttttccactgggaaccgaggatcaaccaaacaaagaacttcagagattaattttacagcatccctgctctctcaactcaatttcccaatgcttatcatcttctgtttaccatatttaactcctcccactctacattaaacaagctaagttttgtcggttagctaactgagattgcaactcaactataatcctatacaaaaagatccacacagttatgaaatatagcctgaaaatctaaaagatgggatctagttccagctatagactttttaaacggattcttctttcttctatgagagatctactaagtgactaagccaatttacattgtgcagaatgtgagtagtaacaacctaggatcaccatacctgactccagctaccaggtgcagcacataaatctacgaccctcttcacacctgcatataattaagacaaagtcggtgagttatacgtctatcaaaagtattgcattcattcaattaagcaggtttttggactcatgtcccgtgattaggcttgagtctgtgaatgagggttcatatgagagataagattaaggattcaagagaccaccttcaaaaatattaaattcttcatcaatctgaagaagcttaaaagcacttcttgcacgccatccttcttctttagctttacgataatagatatcctgcaaccaattggtggaggaacagttaagaactcacgagtataattctgagaaatgcgcaccttttacataaagctctaagaacctcattcaaggcatacatacccttttgtctcgagaagcttttcccatggcctctaaagtagaatacggagttggttcactgcgatgaacactaaaagtcagcgaaaactgaagggacagagataagttaagccactagtgtgtctcagaggcattctatcaaacacattaagtgcacaacaaaaatatctgcaaggtagaaaatttcgagattaaatcgatatacaagaagaagacccgccaaattaccgtatagtatacagcagctaggtatgtgaagaagagtagcaccaaagtagaaattcaaggtagagccaagtgaagaagactgtgtgagagaacaaaaaccgattcttcttatttttcttttgatctgtgccctaacaatttggaagatgacgaaatagagttattgggcttgagaccaagttcttttgggtcacatattaggcccaagtatttattaatggaattttcgagaccaataagtaaaacatgtccgtatccaaataaaacaaacattcggccatgtaaattctgacgaacatttagtgtaattattgtatcgaaatttttattaaaaatataattgattttttgtctttttacaaaaaaagcagtcgattcctaacacaataattacacatcccaagggcattgggttcgaatcttgttaaggaaaatcaaatcaactgattgatttcatatatggattgtcacctgtacgttatgattataaacagtcattaaaccactctaatggcaaatattctccattgaaaaacaagaactggattatctttttctgttaatttacaaaacggaaaacaaaaaaatgattatgaaatacaataaccattataaaaactaggttaaatattgtaaggtttggagtgaaactgagcatgcataaaatctttgaaagtaataatgaagaaatagattgctttcaatgaattgataaggcaacaatatgaatggtcggtcgatctaatgtaatggtctcacttcacagttcacacaactatctgtatatcccttagacgtttgtcttgtctcccacccacttttttttttttttttttaaatcataatcttcttctcaagatttccctactcatggatctcttgttttgttttcatcccttaaataatttccaaaaatggtgaccactatcaatgtgtaatttccccactaatgtactgaataattgatagagaaaaaatcgctaaactatagtacaagtatgaaaagcaaaacatttttaatacgatcaaactgttataatttgtactatatctcaatagtaaatattaaattctaatagaaatgagtgagtttaaaatattcatatcatatgctactcccgataataaagtagtaaattccaagtgaaacataaaaaataaaatctagttgaatcgaagaatcaaattcagagggatcagaactggaaagctgctgattcaacaagtctcggtccatttgaaaagacccaaaggcatcaaagtccattacttattctgtgtttgttaaaacgcactaaaagcccattaataaagtatgttctttttcctaatgtaattatgcaaaaaaatggttcatacataatacattcgtaaccatgacgacactgaataaaaatgttctttttgtatccaattcagtttttgacactaaaaagaactacaatagtattctctttgacgaatcaaagactgcaaaagtcgtgaacaaatatttaacaaaaattttattataaattagaccaagtgatgatgataggaaagatgattgtggattgtaggacaatccgacggtgcagagatggcgagtgcacggagaatcaatggatgcacgcgtagaagaacattggcgcgtagggtcaagggcttgatgacgcgcgtggggggtttgctttaaacgcgtgaagaaggtttaattcccacaaaatggctcggctcaaggctcaagccgacggtatattacactgtcactctcactcccatctcttccgtttaactgttctttcttttcttttagggaataagaaaatctttataaatgataaaatatgttatcgaaagaaagaacaatgtgcactgagatatttaccaacaaaacaaaacaatataaatacactaaaaactctaagaaaagttacttattattagctatgtgttttgtgtattaatgtataatcaaaatattataatgctagaaagtttggtatagtgaccactgtgaaggtaacaaatagtaatataatttgtgttcaaaatcaaaactggatacccaaaatttatgtgtgtcatcataagttacaaatcaaaatggtaaacccacaaaagaaaacacactaagtttaattagagaggtctaaatgatgtgggaatcatagagaaggcaggtaaaaagaaatgaagaaaaagcttcctgcttttatgctctctctctctctctttcattgaacatgtataattataacaaaggcggccgcattaaaagtaaaaaacagaacatttttttaagtagacttcgttattacagtactctcctactcacttgccattgttattacataaccagagagctcttcttcactcttttcctctctctccctccctccctcttccattaaatctttgtggttctcttttattgttttgatactgtgctctgcttcggagagtgtagaaagagacagagctaaagtctctgtgtttcttctcagcaggactaaaaggaaaaaagggtaagagcttggagacaatttttcttccttcataagattctctctttttaaaccataaaaaatcaaaagattgtaacttttcaattatttgtttgctttatataattatctttgtgtaccgtacagaaatcgattgctaatgtcgggtgagaaacaagcggaggagtcaatagtagtctccggggaggatgaggtggccggtagaaaagtggaagattcagcggcggaggaggatattgacggcaacgggggcaatggatttagtatgaagagcttcctctggcatggcgggtccgcttgggacgcctggtttagctgtgcatcaaatcaagtaagtacaatttcgataatgaataattcatctagtagtaatatttactataagaaaacaaatgtttctttattataataagaccaaattactcttttttcgtctgtcctaaagtttttttttaatattctttcataaaacattcttgaaataaataacaacttaagttataaaaacaaaaatatatggttgcaggtggcacaagtgctgttgacgctgccgtattcgttctcgcagttgggaatgttatcaggaatattgcttcaaatattctatgggttaatgggatcttggactgcttatctcatcagtgttctttacgtcgagtatcgtgcccgtatggagaaacaagaagccaaatccttcaaaaaccacgttattcaagtaaattcttccttattttagtttagtgacatattcgaatttgatctcacttttagatttactaaattgaattgcatgtttgttttgttttcttaacacaaaaaaaataaaataaaaaaatgggaagtggtttgaagtgcttgatgggctgctgggtccgtactggaaagcagcggggctcgcatttaattgcaccttcttgttattcggatcagtcatccagctcattgcttgtgctaggtacttcttcctctcttttttattactttttaccaatctttttaatagtatattgatatagagggacaaatacatatatctaaatgataccatcaattgattcatgtgtgtgttgttgttgggatgatgcagcaatatatattacataaacgataggttagacaagaggacatggacttatatatttggggcttgctgtgccacgaccgttttcataccatctttccacaattaccgtatttggtctttcctcggccttggcatgaccacctacaccgcttggtacctcaccatcgcctcttttctccatggtcaggtatgtcctcatcaaaatcaaatgatttaaatgaagaaaaaacaatgtgacttaaaccggttgtaacttactggtttgtaggcggagggtgtgacacattccggtccaaccaagcttgtgttgtactttaccggagccaccaacatcctctataccttcggtggacacgctgtgaccgtgtaagtatttttaatatttctcatggattttcaattaattgtataatccacaacaattggaaaagtgatgcattcctaacaaactaattatagttggatataagttataatttcttctccatatacagcatttgttgtgttgcaatttgcaaatattaaaaaaaaaaatgaattttccctgaagatttatgtttccttcttcttttttaaagactcatctcttttagcttctatatgtgcagcttttgccggttactttaggttctgtcctaaacgcacaaacagacaaaatcattattacggaataaataaagacaaatttaccagaaaaattctatttacctttttaacacacactatagctactagctactgaactcaattcctaacattctttttattttagtaaattttactcacaaatatctatctcatcttcgagagtacgactacgtaacgtaaccacagtggtcggacccggacggccaatctctggtcggacccataaatccactgtaaaagacttttatgccatttccttttacattttatctataaaaaaagttataaaattttcagggaaataatgcatgcgatgtggaaaccaaggaagtttaagagcatctacttgatggcaactctgtacgtcttcacattaacgcttccgtcagcctccgccgtctactgggctttcggcgaccaacttctcaaccactcaaacgctttctctctcctccctaaaacgcgtttccgtgacaccgccgttatcctcatgctcatccatcaggttcctatcatcctaactctcactatgttacatgtctcacaataattacactatgccattaatgattggtccaagttacatgctattatttatacggtaccggtccatactaagaacattattctctttcgcaatgaaattcatactcataaggaatcttgttatagtttatgacatggataaatacgtctaactagttaattaacatttttcgccgtattaacatctagggcgaatgatatatatgtatgaatacaaatgttatcggattatatattctttctcaaaattttgttttggatttacagtttataacgttcgggtttgcgtgtacaccattgtacttcgtatgggaaaaagcgatcggaatgcaccacacaaagagcttatgtctaagagcgctggtgaggctaccggtggtggttccgatatggtttttggcaatcatctttccctttttcgggccaataaactcggcagttggagccttacttgttaccttcaccgtctatatcatccctgccttagcccacatgctcacgtaccgcaccgcctctgcccgccgggtacctacattcttctctcgctcacattaccattcctaaactatactaaagattttatgaattcagtagatgacatacatttatttcatttagatagatagttttgtaaaaaaaattattggaggagagagataaagatatacatacgttggtccatagtatataatgagctggcttataatacttttgcatttaatcacatatcaatggggtaggtccatagtatataatgtgtccattattgtcacttgactagttttataaatgtctataacatatattctcgtcgatgattaaaataagtagattagttcatgcaatgatatgatacgatgtattgatttggctttttttctttaaacgtgatggcgtggcagaacgcggcggagaaaccaccgttttttatccctagctgggctggagtttacgtgataaacgctttcatagtggtttgggtcctagttctcgggttcgggtttggcggatgggccagtatgaccaacttcatcaggcaaattgatacttttggcctctttgccaaatgctaccaatgcaaaccacctccagctccgatcgccgccggagctcaccaccgccgttagttaacgtaagcgacgtgtgatagtgtgattgaacccttttttctttaattctgtatgaaagaaaatatctgtaattcagtgatttagtgaatctatgctataaaatttcgttgaagtcacgtacgtgattagggagctggtgctgttttgtgttgtcacgtgccagtcttcagttttatgacagactaataggtcttcctaactggtagaaaacaactgggtgaggacaaaatggttttcatttttatcaatcagccaatctgtcatatttgactccgagaggacaatacaaacattttgtataaccattttaatcaatccaactttcgaattaatgtaaaacctagcaggctatatcggcccaatataagaccagaccaaaatagtggggttgatatcttattgtgaaggtttctttgcttcgtgtttaattttattgagaatttattattctgtttttaaaatgaattaaagtattaaatctatattacataaaatcatgttgagcttcgaatatcaaaatttacagatcaactaagaacaatatgcttaatcgcagttttcgacgtttttaaaattttaatatttaaactaatctttaaaagtaataatgaaattaagatggttttagttattttaacattattttcttaaggttcggtggtaaaaactcaacggctagtcagatggttcgggtaagactttccatttttctgtgacgtctttggttttgccacgtgtattctcagttgctgttaaacccaaccaaaattagtggggcttaatgtcttattgtgtacctgaaggttttgcttcttatttacaacaaagttatctacagtgtgtgtgattaatggaacaaattcaaacaatagactatgatgatacagaactaatttcacagattatgcaatgctctgaaaccagtttccacatggcacttccttgttcaatttcgtatttcctgctaaacttattccacagatgcaaaccataaccattcctctgcatatgaagaagcttggttttgacccatttcgaatctttctctgttttaggcactttgaacaacttcttaatctcgagccagtttaccgaatagaacacagatggtcgcatgacggtgaagttatagccacttgatccttctacagctctagccactcgtgaaacaaggtatggtccgttgtatccccatatgtttccgttgaaagttttagcgaactcttccatgaatttgagtaacagaggatggttcttgtcgaatattagtaccgcgttgtttagtcttgtccaattcgttgatgaaggatcaagtgtttgtgcaccaatcacgtttctcagacctttgaagctttttagaacaatcatgtctgtgtctaagtacacacctccatatttgtacaagtaagcaagcctcatgagatttgagagattctgagctaaagaaatctttccgggatctcttttaccgctctttatttcgtcgagccacaactctcccgcggttcctttgagcagaaaaggcaaatctggtgtgactgcaagaactttgtaaccacgatcaataaacggcttcaaagttgcataaccttgaggagaatccatggttgcggataagatcatcaagcaaccatacggatgagacttaaagacactttcaatagctaaaacctctctattgccaaagaaatctgctggtgatatccatgtcatgacgaagttgacttcgcatccatcaccgacaaactcatttaccctcttttgaaacttgtcagacaagttatctccactgaaaacttcgataacttggagcttctcgtttacttgtgtctgttgtttgagcagatcacttctttcaccttctctctcagaactcagaggtaagtgtggaatcactctcttgatctctatcttcactcctgagaaatctctatgcggttgcatcgagaaattagaaattagagtaaacgtggtaaccacgatcagagttacaaagctgatagcgaaggcggtgaaaagtgatgatgatcctgattggtttagtcgtctgttatcaatcaccaccgtgaatctcttttctatatcatgacgatccataataaacacagaactgaaatgttctgaagttggaaaccagaaaagaaaaggagatttagattgataagaaagaaaccacttttgagtttctctgtgtctgttttatttcttgtttaacttgttttgaccacgttcttgtctttgggggctgtctagttttgaaaagttaaagaactcagacatagacatttttgacgtattaccgaaataattaatattgatgaaacgaataatgggaaaataagtaatttcaaatttctaacaacacatatatttaaagttttaaaaggattctttttcattcatcctaaatggaaatgttctaaatatatatttttttggtttaatgtgaatctaaatgttctaaacagctaataatatttttgttcttttcaattatttggggttatcatcacatattttgtagaattctctagtcatacccttaatagtactacactaaccaaaaactgtttcatatgaaaacttgtacatactttatttgtcattctttattactaacattttctattattgccttattggtcaactttttggctaacacggaacataataactaaagttcgatgtgtattcttcttacgaaaatactgatttatatcgtattgatatttctgtttgaactcttaatcaatgataagtgttaatatattgttatttggttgatgcaaaatgatatttggaaaaagacgtgtgtgtattaaaatccaaattatcaatgactcattgtatttcaatctctaggctttctagtttctagctttgataaggttcttattttattataatactatttaaacaatgttagttggattttaatattattttgaatgaaaaaccctgctattttacggttgactaattaagaaatataaaatattaagacatttgaactatgcaataacgacaaaaatatgtaaactcgaatagatagaattggttggctggattttggtttagctccaaattcagttttcactattagatccttaatgtttactataggttagaataagatgaattgtgaattagtaaatgaatgtatagaatataatatatgtattttattggttctataaggcatgattagggttatctttgtttatctttatattggaaacttgattggtccatgcataatcagtttcctccacacgacttgtcaaagctatgtaagcattttgaccgtaacaactgaaagcaccttatagaattaaattatatatgtatcacattactttaaatctcattactgtagattgataatatcagctcaacaacaactagagaaatgcaacttatgcagcagtataagtttgttgtattgttcctccgatccttccaagttccaagcctattcattgacatagacaacgtttctaaagctaatgaaagattgcatataaactttgtgtaagatccaccaaagtcaaaattaatggcaatggatcataatttggcccatgggctttaagtgaattatatggaatgatctaatgacatttatgcccctaaggttttgaccgtcacgcagaaaccaaggagttagttccaatcacgtgggaaacaatcgcgtaaatcggacggtagaaattaaatgcgggtgagcaccgagctgtgagtataagagaattccaatgttcagacaattgccacgtggacttatgctttgctttcgtttccacacagtacattgctcccttcccactcacacaaaccaaaaaccaaaaactcttcttcttctgatgaaagatgattggcattggaagaaccctaacttcttcttctccatctaagatcattctcgaagatcttcctcctggaatttatcgctatggaacagagatattcacttccgttcccaggaaaacgttccatcacatcaagtttttgcgtttggattctgctcagagcagcaggattcttaagccggtcccgcttcgttcttcgtcgattaaggattcgcaggtaattaatcacacctctctttctgtctttcacgtgtaatcgtttctctgtaattcctatttgctctgtttacgacgaagaatgagattcaggtttgttcatacattttgataggtaaacgtagaagatgaagaaatcgaagcttctaacaaaacagttcgtgtaaggttccagttgcggaaagaatgtgtctttggggaacattttttcattgttggtgatgatcctgtgttcggtggcctttgggatccagaaactgccttaccactgaactggtctgatggcaatgtttggactgtagatttggtataaatgagtgaatttctttttctttaagagtttaaaatactgaatgtgttaggtttaccctgatgttgctttctttctgctcaggatttgcctgttggaagattggttgaatttaagcttttattgaaggcacagacaggggagattttgtggcaaccaggtccaaaccgggctcttgaaacctgggaaactaacaaaactatcagaatatgtgaagactgggataatgctgatcttcaaatgatgattgaggaagattttgtgccttacaccaatatttcgtcgatcggttcagaagatgaggatgaagtgcttggtagtgtacaacaaaactcttcagtagtagctgtagagaatgcaggatacgtgagtgatgagtctgcccagaattcgagtttcagtatccaaagtgagaaaactatggaaccttcgaatggagctttgactgctcgggaggtgatcaaagaagccatgtttactgaggaagaaagtccagttttggttcctggattgattcctctgtctgacttggataatgaacaagtggaagttattaatgaaggtaaagcagaaacgttcccggaggtaataacctgatcagttttgaagttttatgttcctgtttttctataaaaaccttaagagctgttgttatgcacactgctgctgatggtaatgaaatctttgcatgtggattattgatgctttaagacatcatgtttgtgtgtagaataagactatgcttgtccactggttcaatgtatattgttaccccagttcatgataaaagtttccttcactatattgactattcttgtccactggtacaatgcatatctaactgttaaattattttccagcaatgtgattttcggctgcaaatgcccttcttgtgctatttgcaggtagataagaagcaagaacccaaagcagaaagaaacaagaaagcaaaagtaaaagcgatttcattattcgagaaatcggagcaagaagcagtgaaaagtgtagagcagaggcaatacaatgcagtagaggaagagcagcagcggctagagacagagccgcttggaacgccggatgtgctttttgagaatgatatccaatggggacgcagaacactttacaagcttctaagcaactttagacttttctaaactcgactaagttttgagtgcatacatacatcggcaaaagagcctcaagagtcaagaagatgtttccgacagatagtcaaaaactgctcttaaaaggtaggctaccttcttcttctatgctcatctttacgttttgtatctatgagaactgggagtagattgaaaccaatgttgtgttgtctttgtatatatgtaatgatcaaatggttttggtaaagagaaagatgaagaaagaatggactgttagtgttagctgttaagtacataggacagtatgtagcatctggatcctattctcccatataattgtattgttgctacataataatgatgatgatgatgatgattatcttatgattgaacttacaattccaatgtcttacataatgatgatgatcatgattaaacatatcaataatttagttgtacattttttaatggtttatcaagtttggacctttggtgctgctcttgacgaagggccaggtaattgctgacgccgtacgtttaggagcacctcgtttttttcaccttgtcatatatttgtaaatctcgatgaccatatgcttttatttttatcccaatataatcgaaaaatcccaaatgatatgcgatttcttgttgtatgatttacacacaacatgagatgcaataatgttagtgggcactgggcaggaggaaatgcgataaagttaataaaattgtgacaaaaacgtaaggtgataaactaaagggttcttaatcaaaaactacataaatcccttctaactaatccacatgctggtttttaagaaccacaacaacaaaaaaaactatcaacttagactacaaatatacaatcactatacacaagacaaagcctaattgaggtggagccttgggtgcaaggtttcatactcactttctcaaaactctagaaaccaaaacagcaagagtcatgagactagctccctgaggaataggccatcttttcatcaaaaagtctcttatttgggacactttgttaccttttttgatctttgcttattttctcacattggtaatgaatatataccgtatgtcttcttccccacaatcacatctctctttcgacctaaattttgcatttctgcaaaactcacaactctgaaatgttttctttaggcgcttcctcttcaagtcctttgtttgatacatcttcactgctttcccacaaaaatccattatcattttccggacctttctctgtttctctagctagaggtgccacatgtgcaacatacttttctgcacaaagcaacacaaagaagatttaccaatctgtaaccaaatttgctcactacacaaaagactaagaacaatctgcagacttaatcaagtggtgaaatagatccacagttattaattcccctagaagaaactttaccagccaaacttcgaagagcattctcagccgcttgttgatgtgcatctttcttagtttttgccatcccaatgcctatcttctcacccgtgaacaacacctttgtaaaattaacaacaacgattaaaaacaaatataagtaaagctaacaatagacaaagatgcttcaataaactgatccagctgacctcaactgaaaactgtaactctttgttggtacttatcacagtcctaaactccacctgcaaaatcgtacatcaattaatcagaatccattaaaagagaagaagcaatggcttgcgtggttagtgaatatgcacctttgaaccacatcttcttccaatttcttgcagtgcactcacaaataaatgagattgcccgccattactctttccaccatctgtatgatgttctctaccatttgacaccaaatgattctgggatattccaccttctgcaaatagtttaaacaagtgccaatgttaaaaaggtattaatgcaccttattattcaagtagctgttacagattcagtagaaagacaatacatcagatagggaaaccaacaattctctaatcctaagtcaatatctaatgtagctttagagcggtacactgaaaacaagcttcacggaggaaacaagaaattcagggatagactaatcatctttaatatcagcttgattgcattagtgttgaaactagaacatacctgttgtttgacgtgaaggattttgccttttcaggtcatcatccattgctacctgcaagaaaactatcagaccgtagacaacatactttgatgtcaaaagagagacacttagaacgcaaaactaacctcttcactcctcaagtgggatggatgtgcaaatggaccaacaggagcagaacctggtgttccatgaggaaattgacttggataaagtcctgaaggccgaccaggaaaagaaggtctattctcatcatctaccaaccaaccacccggagaatgcatagacgaggaaggtggctgcataggaattttagccagaatggggggttgattaaagttttggttccttatatctacaccaggcctcatcataaggggtcttccaccatcagaaaaagtgaagccatcccgcctaggagctccaagcaaactaggttctagattgtgattgaagacaagagatagagaacgtcagagacaaacatatacgtgcaaaataactgtacagttcaaaatttaaagttatattaagtcaaaagtttgtactatgagaaggtaacagtgctgctgcagttgccgtgcttgcattatttggtataactgctatctgcggcttaggggtttcaggtttctgctcagcgttacttgttgcaggaagagtagaatgatcagctgcagccttctcatcccagaaattgaaaagtcaacagaaatcaaattacaactgacacaaaagctatgcaccaaaacatattttagttaattaatcccaaattttgtatatattttactaaccgcttggtttagtcttcgttccacttcacccccacacattccttcgttaattggaggagcatttatgtttccatttgaagcaaagccaggatcctacagacagatatagctagattacatattgtagttggggcaaattagcaatatgttaacaatgataaagttctaactacagttacctctataacgacgtagttgctcacatccggtgatggaggtaaattttccacatcatcttcatagtaaaccaaagatatactactcattaaactctcatcaaattccctgccataaaagtctagaaacagtaagaacaaccagcatgaattcattacataaaaataaaaaaaaaacataatttttttttccaacttacttgaaaaagtaacctctgacattgcatgcaacatttcttgctacgcagagatgtggaacgacaagggctgtctgataaatgggcatacgaaaatggttagatacccacttggaaaattaagtgatacagaatttaattcacaactaaatgcaagagcaaccacatgcctctgcttgtggagcataataaggaagatatgcagaaacaacatgaacccgtggttgatccttgtcctcccaaaccttcatacggtcatcaatgaccattgccattttcgggtggcaaatgccaccattgaagacacttaacaacgatttcttggcgtctgatatgcaaagagcaagacataaaaaaattgttagttcgagtttcagagagagacagagacagatagttgggtaaaaaatgatcaggttcatctcttaatactaaaaactgagaggtcggcaaatcaatcaggcacgatagagggagggagaagaggcacattatattaaacaattcaccacaaaaagagtaatgaaagctacactaatggagcatggtggctatgtaccaaaaccaagatcaagggtatcaaagaagccagagttggttttgacctggttttacgcagacgatacgatctcgaagctccttgagacttatcaagtgtgcttccggatcaagcagtctccacatttccagagcataatccctttcagccatggtacaaacgtaaacttcaaaacgtttcctagttttggctgtcaaataacttcttaactcctcccatgctggtctcagttttacaagcacactagtgtcacggatctgcatcagcaataacttggtttcagttccaacaatattaaagctaaatcactcaaatatacttaagcgaccttatcctatcacatgccagagaaggtaaatccaaagcatcaaataagatgaaatgaataaatatccagccacaacagagatgaatcttctaacctctggcttaatccgagtaagcacagtattcttctccggcaatctaatcacgggtctacaaactttctcttgtccatcagaagttgggcggacttcctcaggttgagcctttaacaaaactccgttatcaaaagcatagtcattatcaatatactgcttcagcagcatcctatcatccatataccttttaagttctgctgacatcccattaatcctcacaggatccatctcacgtgaaatccaagatttaagagcctcgattctatcctcaaatgacttcatagtatttgcaacaatcaaagtctcatccaaatcaaacacaatagacaaacaccgagtattaagcatccttaagcacgaatcataaagacctgaaggaaccgaaaaacaccaaaaacacgggaacttcttctccttactcggcatcgccactaaatgaatctcctcatctccgagcataaccactgcagtctgtattcacaaaatcaaactagtgaatcactcctaacaattggaaaacatccaaaatcagctaaatgtcatttcggaaatctcaaacctaccttcaattcatggaaacagactgcgtgtagatgcattaactcttgagatttcaccggagccgatgactcaagcttgcatcgaacggcaaaagaagcaatcgtctgaagaatcgcgagcggaggacatctctcaccagccggagatagatggtggattcgaatctcatcgttcgggaatcgaaattcatgacttgaagatacatggttcacatcaagttcccccaaacgtaaatctccgtgataaaccacggatttatgacccaaacgattcatcgtgaattcgttcaattcacacttctgaaggacgaatcaggtagtgaagataaacagtttctgggaaaatgcgtgagagaatctgcagattcaatttctctcaaacttcgctacttttctctgtgatttttctccgcaaatgagggtttttctgggtctccttaaacatgagaaccaaagtaggctcagatatatatttataggcgagagaagcgttttattgttacgacatcgattttaatgtaaattacgagaaaacctgagacttctttacacgtggcgtcagatgcattatcctgttttcaccaacatcgcttgtcagccgtcaattaccgttcctaacaaaataaaatattcgagaattattttttgtgtgtatgacgaaatcggattaggtcgataattttggttgacttcgaacaaatggatagttaatgtttacaactatatattgtaaaatgtggaaacgtattcaataacttactttagaagtaaataaaaattgtgaaaaaaaaacggaagaggatatatatatggtaaaatcacaaaaatcaaataagaacataaagttggttggcaaaaaaagagaagacatcaagttgcgagtcttgtgacgtttgagtaagaaagggacaaatcaattttatacaatctgtatcatcatattattatgggtgtgttggcaaattagtcacttttgaaaacataattatggagttgggcaagttactatttataattggcaaaacaggtaactcactttgggcgtgtaatagacgagcgtgaaatagaggtttggggtggggtaagtgatgtgttttgaaattaccgaactatccttttgacaaagaagaaagataaaagtgaaatattcttttttttttttatttctttttaataacccctccaatttaataattgaaatacttatcaatataaatttattttctaaactaattcatatacataaaaatctatgtatttttctctataatttgatatgcattttgttaatattttttaatatattacagacattttatcagtagtcggtacacttaattatgtgtacagactttattttgtatgttgcattagctgtacagagtatataattgtatggagtatacaattatcagaagtcacttttcactgttgattcgtacacttagacctgtacaatatttttagtgtatatatatatatataaatatacacaacatacacttacatctgtacactaaaaagtgttgtacagatctaagtgtacgaatcaaacagttaaaagtgactactttgcaaattgtgaatagtaaaatgactattttcccaattatggctggacgatttcaatttgtacttattaaataagttgtataaataaaaatctgtacacataattaactgtactgactactaataaaaatgtttatataatatatttaaaattattaacaaaatgcatatcaaattatagagaaaaaaatatagatttttatgtatctgaattaatttagaaaataaatttacattgataagcatttcaattattagattgaagaggttattaaaaaataaataaatatatatatatataaagaaatacaaagaatgagagtatgaggagagagaaatgttgaatctaaaagcacaaatcccaattgctttcaacgacattagagaagaagaagattagtggcatatttgtaaataatagagttggtatggggtatatttgattttgtctgtaatagggtcaaaggtcagtgactaaaaatccaattataaatagtaacttgcccaattccataattaagtttaaataagtgactactttgcaacttaaccctattattatcaagattctaagagacagatgtttattgcaagtcggaaaacaattgcctcttcggtccaaaattaacatgtaaatcaaaattcatggccattctaatagttgagaaccttcatgagagtatttaaatatgtatctcaacttatgtcgcttaaagttatagttacttgttgtaagttgtaactcttaagagcaactcatgtcgctgagattatcgtcgctaccgtctaagcacaaaatgttgacacttgattccgagcttcggctgctgctcaccggccggtttcgacatgatctcacactgtacaccgaagtcgccggtgctttcgtcactgaatgtcggaaattccccgccatgcttccttttctaacatcctattaacacataaacaaaagtactccaaagttgaaagtcgttgaaattcatggttgatgacctttaatatcatttcatttgttaccgtaccatgtgtctcaaggccatgtcgatggagcttttagataggtttctaccaaacccaaaaccaccagatccagagctcgacttcccagcggaggagtctccgccacctccaccaagtcgtcgactgccgctttctgtcagtcgcggtgtagcaagttttctcatattcacaactttctcgaccttttgattccccttagccgcatgacttatcaatctaccatcatcgttgttagtctttgctcgttgtccacgtaacgaaggaacagcaccatttacgtttccattaggagctcggcttctagaaggcgaacacgattgcctctttgcaacatcgcgttctgtggacgctgatcttgaactacttgacgcatcaaaggctctggttctgctacttgaagcggtttgtggcctatctggtaacgtagttctgagattcgatggcgcttctactgagaatccaggcatctcgtaaggttcccatggccttgatctcacgatcggagaagcttctaaagacagagccggtttactcaaaggcttagttggtttacttctcagtacagtcgatgaaccgttcggagttgatggacggcgagttggagtacttgacctcgatcccggttttgaattaggagccgacatcggcctgttattggatcgagtagaggtggctgaaccggtagtttgttggtctgttgaggtggtgggcctggttgcacgtgcagcggttaaggtaacacgtgaggttccagttccggagctagaggaaggtctgctccatgatcttgttgagctagtagtagaggacgaggttaatgtcgcacgtgtagttgttgaggtggcacgtgaggtcggcgttgatggccttttggctggagttttagactttctggttggcgtgggaggtctactcgttgatcttgagctactagaggacgatggtcttctgattccagaaacagaggaggaactgtgtaacgacgtcgtttggtgctcggactcttctttgctatagttctctaactgcacataaaaaaaaaaaaaaaaaaacagagatgagcaagagtgtgacgtatatgcagacacttaaaaacaaagagattgacgagattagaccacgagatatactgagtccgtacccgagatataagagtcatcaggttatcatcgggtgcgttgaggtggttcgttacgtttctactcggtgagcctggtggcgtgaccagcctgaacaataagaacaatcaataaagatcgatggcaacaaatatataaatcgattatgttgaaacattggcaaaaggtccaattttgaaaaatatatatttgagatatgtaacatcaataaaagtgattgaaaagtacaaccataactagttaacaaaaacaaataaaaatccatagctagtgaattgttttttagaatgctttaccaactcaaattctgatgaacaagatcagacatcaaactactgtctagcaagaagaataaccgagaaaattgatcaaatttactctctttttgttcggtggaatgtgtgctacgttctatacgaacacaaatatttttaatgcaaaaatgtaacaaaacataataaaaaggggggaaatgtttcaaggcaagatttttaaatcatgatcagacttttagagagcatgatcaaattaattaaaagggggaaatgattaccattcgtaatcggacttctcgccatcggagtacaataagttctccccggcagttctccggacagggtattgttgagacgacatcgccgtcgtactactagtattatcagattctgccaaaaagataaatcagaacaaaaaagaagataatttttcgacaacatatattaacacatatacgaacacggacccattaaaagcgtaggtcggtgacgtttctcgcaacgacgcatctccaggaacaaaagaagctcttcatctttgttttgggtcaacattttaagacattttttaaattaaattgctgatgctggaagaaagtggtgaagatgttcttttacgtgttttttcttcttcttattatttgaaaatgtcagattatcattcacacccctactaatgatatatgtataagcaagtaatatttattattaaaaagtaaggaaagtaattattgttgttttttacttatatcatattaatgtattttggctactactaagagaatttttattattttctccagcaaaaatttaagagattttttttctcaatgatattattagtttatatctttactttaaaaaagaaatacaagattatttctcaatctccactaaatttctggaaatggtattattaaatttcattagattttcttaaagcattcaattttattatatctttagaaaaaaaaaatgccatgctggaaataaaactaaaaatttacaatacattaatccaaggtgccgaaaaaattctcacgagtaaaatcaatgcatctgtgtgaaatatatgtgaatctcgcgtatagatgagtttgtcttacattgaatccttccaatgttgtgatatatttttaagtttagcatgttaatgcaaaaatgacttatcgatctcccccatgtcacaactacaagcctcaactctgctaataagaaataaacgaaggattccatggaggatcaatatgtcgttatgtgtccaattcccgattctacttaaatgaagttggtttgagagacattattcttatttaagtggatttaaagctcaaggcccaatacccattttcaaaggcccaaacattaactaggttctaggtatccccccccttatgtttttattcagcaacagtttcgaatatgtttcgtctagacgagcgagactctctctgctaggtttcgatttcaatttcgatatcagggaccattttcctgattcttcgaattctgcatagagaagcgaaattgggatagatctcgtttactttgatttgtcaatttcctgcattctattatacgggttttgtgtttcctcgcaaattgatacagactgttgctttgccattgaattatttgctgcgatggacctaaatgcttcaccacaacccgaagaagacgatgaaccctttaagagacgtcatgaagatcgaatggaatctgctgttgagatcgctagacgggtacaataacccatatatatgaattgattcatgtgttactcgtacttgtttgaatatgtttggagcaagtttgatacttttggatgatgatatcgcaaattcgttatctttttggcgttataggagcgtgaagaacgaaagaaacgaatgagatttgataggccaacacgagtctctcagccggcttttcgtgatcagtatagagatactagagtttatgatcaaagcaagcttcctcagggtaaattatatgctttgccacttcctcaaaagatcattttaggttcattggtatgtggtttttttcttaacaggttggctagattgtcctggttttggtctggagataggatgtattattccttctaaggttccacttagtgaatcttacaacgaacatgttcctcctggtaaaagatactctttcaaacaggtggttcgtaaccagagaattaatggaagaaaagtaagtgaaaaaaatacatgaatcaatctttttctttgctatgttaactctctaaaggtaatgggtcttttgcagcttggtctagtcattgatcttactaatacaactcgttactaccctacattagacttaaagaaggatggcatcaagcatgttaaggtgactagaatacatttttttcttagtgtttgtatcgtctgcaccagtgttagccgagtgctttatcctctttttcctgtttgtagattgcatgcaggggtcgtgatgctgtgcctgataatgtctctgtaaacacctttgtcaacgaggtacttgtttcataagttcagttctcttcttgactgacgaataagttcaattcacgtgaagtttattttctcctcttgcgttttaattgaagctcataattatagctcatttgaggacactgtcttcaggttctgcagttcgtccttaatcaaaaacacgcaaagaagtatgtcctcgtccactgtacacatgggcataatcggacagggttcatgatagttcattatctcatgcgctctatgccaacgatgaacgttacacaggttcaattctttctttcacatttgtacttgttcactcgttttattaatcctctttagaatggagattcttacctctgtgtggcctttggcaggcattgaagttgttttctgatgcccgcccacctgggatttataaaccagattatattgatgctttatacactttttatcacgaaataaagcctgaaagtgttacttgcccaccaactcctgaatggaagaggtctgccgagcttgatcttaatggtgaagctgttcaagatgatgatgatgatgattctccgcctgaccctgttcaagtaagcgtggtgcaagcaagtgcttattctttaataagctcttatgtttaaccctcatattacagaattatccgttccaatgaatatcatgcatgcattgttaagctcttacccttgtgaatacagagctcataattttacgaacggctaattttttttaaattctagcttcataactattgtttcgaggtcatatattcactacacagtgatcttggaaaataacggtatcatctaaacaaatgaactgttctaaagattatctatttgtgcatgttgatgggtgcagttgagtctttcaaagctaacaaatttcataaagtgtcaatctcattttgcttgagttttctaatgggtctcttgctgatactgcctttctttactgttttgttgtttcaggaaatcaatcaggagaatgtgaagatgtcaaatgatgacactttgggtgatgaaataccccattatcaggaggaagcttaccggcaattctgttataaaatgcttatgatgaatgttggggtatgatatcaacactgcttatatgttttcctagttttgttcttctctatctatgttctcctatggaatattatgttgagcccaaatgttgtttccggcatgtatgtttcattaaaagcatgctaaatgtttttttagactaatgcaataatactaatcttcattgattggaaataatgtgagatattagtcatttgatggactaaaatttctctgatccagggaagaggatttatgcaattcccaggttcgcaccctgtatcattagacaggtcagaatctctgctttacttttggtattgcgtacaaagaggatttagcaagtgtatgttctgaattccagaggttcattagtcctagtttctcaatgtagttaaatctttacgatttttgcatacacagggagagtttgcaacttttgaggcagcgatactattatgcgacatggaaggcagatggaacacgttatatgatgctcttaactatagatgggtgctatttgatagataggagctttaagtttcggagggtacagatgcgttttccctgtaagcactcacgtgaggtcagtaattttctgtcattgcttttgtgttgatatctaaaacttgtgaattccctgacttatttggttttgggtggtagggaatttctgataaagtgcatcactacactttgcttgatggagagatggtcatagataccccgacaggtgagcaaggggaggcaaggaggaggtatctcgtatatgatatggtagcaatcaatggtgaatcagttgtagaggttggaactgtcgatccattatattatcaatttctttggaatgagttcagtagcacgagatcttagcattcattgttttccatcatgtcactgtcatttctactcggtatcaaccagtattatagatgctaaagataacttacagttgatttaaatatctaccagcggactttctgtgaaagatggaacatgttcgtgcgtgaggtgatcggacctcgagcagctgagaagctcagaagtcattgctacagatatgaccttgagccttttgcggtgagtttgcattttctgttccatgccatattttccttctcctttatataaatttgttggtaaaatttcattgttgcccaggtacggatgaagggtttctggttactttctactgttgagaagctgttgaagaataccattccatcgctttcgcatgaagcagatggcttaatatttcaggtaaccaagagatgtttatatttcaggtcttagtcaatattttttcctgaacgcagacagacacaaatttaagagattagtattatttgtttccctggataaagtaggaagattgcattacttgagcatgacttacatttggtttattagggttgggatgatccgtatgttccacgaacccataaaggtctactgaagtggaagtatgcagaaatgaactcagtagactttctgtatgagatgggtgaggaagaggggcgtggtttcctcttcttgcatgaaagagggaagaaaaagcttatggaaggatattcagttgagtttagagatgattcggacccgtcaagttacaatgggaagattgtagaatgtgcttgggataaggataagaaagtttggtttagcatgaggatcagagttgacaaaactacaccaaatgatatcaacactgctcgtaaggtcagttgaaggattttctatatatttaggtattgcttttgtcaaatggttatattctctacatgatttctaatgtgatgttgtaacacaataggtgataaagagcataaatgataacatcactgaggaggttttgcttcaggaaataagagagatcattcgtctcccaatgtacgctgaccgcattcgaaatgatagtcaagctgcccgccgccggtagagattacatttttcaattttgtttagtagtaatacactagaacgaactaataattgttttgggcggtttctcttctctcacacttgtacagctaaataatctacatggttatacacattacatctagtttgtttcccaacggaatttgaaactagaattatttcattgataatcctcaatacgtgatatggaattattaactatgatacatatccaacggtgttatgactataacgacgaacgacatattttaggccaaacacgtcaagatggcttctcctagcacgtgcccttcaattgcgatcagcaatctctctttcgtcacctagctcatattcagaacaactatttataaaaaaaagtactacataaagtactacatatcattcaaatcagataggaaaataataaaacgatgtagtaccgtgtgaccaatcttgggtttatcatcgagagcaaaaagcttgaactgaaaacggtgaccgtgactaggtaagagaggtccacgccatcccggaatcttgtgatcgttgttcccttcccgaataccggtagtctgatcctcattgccggaatatccttccggtaggcctttcatctctggtggtatgtcgacgacaacccacaccgtccatggcaccagcgggccactaggatcaggcgcatcgatgtcttccaccaccaaagctagcgtttttgtaccttctggaacgttgtacctacaccatatcaacattcttactaattcaatgcaatcctttgggtcggtcaataaaccacaaaataattaaaaaatggaaacatgttacttcaaacagaaaaaaacaaacaactaggaagccttgtgaattgtgataattaacaaatcgacaaaattaataatctctgtttcagcatcatgaatcaaagtcataaataaagagcgatcgatcggtaccattcaagaggaggagagatgtctttcttaacaccttgacctgccatcgtatactttctcggcaacttcccatcgttgtctatcgtcggcgaaaccagcctcaactcctcactcgacattcccttttacttttatgctatttcttacttagttttatcacaaagagtctcttcttttctactttcgtacatatgaatgctcttttcgtgtttgttactgatttgtatggatcgcctatgtgtagaaacaacgccacgtgacggtcttgaatgacacttggcgtcatgattgacacacggcgtcataggaaatctggcgaagacctgtgtttgagcacaactctatattgggctttattgggcctaaattgtattttttcctctctactatattagcctgtctcgttcttttttaaatcacgttatcttattattaaaggaccacttaacagtatactaattattgttttaacaattcccaccaaaaaaataattattgccttaacaataaaacaaagataattttaatataaattaaatttgtttaattttaaaattacaataaaagatatttcttattttataaacaaaaactcttctcatctttttttcttctattttttaatttattaaataagaatatctaaattaactaccttctaactaaaattaaagtgatttccatgtaatatttatcaattttgaagtcatagtaggatgctctaacgtgagccgttttaaccaatcgttaacaaagaattc

SEQ ID NO: 119 - DNA, 88095 bp, Arabidopsis thaliana
gaattcttccagtgttttggctcacctgaaagaatttaagatctgatttatatgcgttttcaactccaaacaagtaaagataatgtcatttgtaaatttcccaatagaagtaagaatcagattgcagcgtagatccaataaacttagaaactgacacgagattgaaaagtatgcagtggattcaccaaatttggcctccttgtaatgattgtacttttcatgaccaccaaggcaacaagaataacaaatgaaatataaagagccaatgcagactttgaactttacctcaaatctcagagaatctatgagtggaaaaatggaactggaatcaacttctttcacaagcccatcatcagcaataagctgcatcataagaaaatgtatttacattttaggacatgtcagagaagaaaaatagacctttcataagatttaagttcatacatttttaggcttatgattttcttggttttcctgggctaacatagtcaaagaaatggtgccagaagacctcatgccagagccggaaccattctcaacaaaaggacagacttctaatatttccaattgagaagtcatgtcgtcctgctaggccaaaaaaatcaaaaagcattcagccaaatgtctccttgattatggaactcagatattcatggtatacgaaagataaattccgaggtcataaaggtccaaactatttgatcaatgaaaagtcaagagataaaccttgagatcaatagtatttgacacatctgtctcagttcccggatcgtcacagctttcaacaatcttatcagctactacagtatttgattctgatggttgcccttcaagaacttctctttcactgctttcttcagcaggcttgaaaatagatgctcctccaatctgcccagacaatttttttatcatataaactaatggttgtcatgtgaataaaattaagcctatgacatatgaataaacctctatgtggtgtgaacatctaatgggaaggacaataatctactgagaattgagaaaaagagcaaagatttgagaggtacttcgatttcagtcttcccatcatattttccatcagtggtagatgaaatacggtgcaacttcttgtttagattttgccaatttgactcgtccatagtatcctgttacataagagtcgctattcaattatagtggataaggcaaacttcaagtaactagtataacagcagcaaacgagtttaccttcgcgcagaagatgtatacatttactgcacttgtttggcctcgcctatgtgctctatcctcagccttcaaaatgtaatcaattgattatgcatctagcagccttaccgcattttgcagataggtttaagaacaagaacaagaagttaaaaagtataaaaagagcagtacagggaaaatacctgaagcaacagagacggtgttttaggcaattcaaggaacacaacattttgtgctgctgaaaaatccagtccaactcctccagcttctacaccaattattgcaatttttacctggatgggaaagccaaagcataggtcaaataccacacattctaacaggcacaataaattcaagagttgataaatgtatagaagatattgtgcatacctcactagaaaactgaaatgactgtacagccaattgtctatctcttggcaatgtcgtcccatcaatgcgaacaaaaccaatccctttatcacatataaattcctgaaaagcaataatcacaagaaaaaatttaaaagcaaaatacttgttcgaatatgttaaatgagctagcagagatataaagttttgaattttcaaagagttaatgacgagaattaaatatattaacctgaattccatccagaaccttatggtgatgtgcaaaaacgaccattttagttgagcttctgtctccatcaatttcttctggggtataatccaatcctgatagaagtggatgtagagataaccattcacgaaaggcagaaagctttgcaatgccaagttgttgataggaaagtttcccacatagttgattctctttgtcagctaaagcacaacaaaaggaaaaaatgaaaaaaaaaagagagagagtcaaatatatgcaaagagaattgtctccttgacatctatggaaagaaaacagtcaaaacatacagttagggccatcagaattctctgcgtttacatgtccagcttcatttgatccacgagcattttggtctatacttaaaaggcagcatgtgttaaaacagtgtacggaccacagtagttaactagatgtaaactccaagacacttaaggtttgtgttaatggcaaaaatataatgcctcgaatactgatgataaaaacagttcaacatcatcactaggttggtataaagccagccacataccaggttcatgtgacttctctgtgacttctgctatagcaccatccttttgtttcttagcctcgctgacaatagccattgctaaagctatatcagacttctttagcaagatggttacgatttgcctacgttttgggggtaactgtgttaacaaatgctgcttcagtcttcttatctataacaaacaaaaaggaattttcacatgacatagttctccaccaaatcacaacacaatacaagaaactttggcataacatataagtgatatcatttcttttctttttttcttcacaaatttcacgaacagctccaggcaataaacagatagttaactgaactgtgaatgttggaacatgggaatattttcacccacaactctaaatttaattctcttcatatttatctagaaatacttctaaagttataagttgtaacaaacattcaaattatggtttgagagactagtcctatctgaattctgaggaaaattcaattagaaaaaaacaagtttcccagtatcgaccattgttacggaaccattaatgccaaactgaaatagaagtataagaatttaccatcactgtttggtttagcagtatgtttaactccagtaagcgagtacccttggaaaaatcctgaatcgttgaacaaaagatttgttaccatctcgcaacattaacaaaagaaaaaactaagataagggaaccaaagttcatatcagaaaggaagtgattgaaaagaaataaaatgaagtatgatagcaacatcctctatgggtgaccatttaccatgcaatgggagtattatgcacttaaaatatggaataatgacgacacaacaggctaccacataaagtccaaatttacctggaaaatcttcccttggatacctctgacaagcccaacttcacaataggttttcgcaaactcatacttatcttttcccagcaaaccaggcctggtgacagaatcagtgttagaaaaggtaagtagtgcgaatccaatcttttatgtcaaaaagtttgcagatgacttgccatagcatgtttatctgatggaaaatgtcgaagggcctgtggtcacataggaaacaaatataaggataaattacaaattcgaagtaaatggaagatactgatttttacagagttaagtttccacaacctcgatacagaaggagttcctgacaacagaattatgtgcttaaccttttcagcaacatcaaggactgtctttatctgcaaaacataaccgaacgtattttgactaccaaccttttttaaaaagcacaaaatctccactcagagttaaggatgtctcatgaagtgttagagaaagtgtcactgaatcatctctgtgtttatcgaaggtaattaaagtcaaccaggaaatcatagaaaaggggacacaggaagccatgcttaaaaatctcattaatgaggaaaacgaattcttacatacctcaggtggatctgacttctttttcgaacatcgtagatgatgagattcatctactatcaagagggcccattctcgctctagcatggtcgtccggagatgctgaagcatcttgtatgagataaccacaacttttggccatcttggtaaataggcaggattatcttgatgaccgaatactgaaaccaaaagtttcatcaaacacaactcgatttgaaaagatagccaattaaagctttagctttagagctccagaggagaaaaaaaaagtattagagacagaaattgctaaattgcaattctgtattccatcagttaatatgtgcaggacttggaagtgaaagataaaaccagaaaggtaacacgcaaaattgttaattctgtattcaactaatgtagctaacaagtgcaagacacataagtttagaagagaaaagataggcaattcagtagagacttttaccgagatgtacgtcagaaggcaaacaagatggcaaccaacgttccaattcttctgcccatgtgaaacgcaaaacagcaggacagacaacaagtatggaaccctcacttatgaagcaaccggcaatggcgatggcctgacacaagattgaacactcaagattaactactttaccaaactactaaaaactttcttctacaataccaaatatataacctgaagcgtctttccaagccccatttcatcagcaatgaaacacctgccacctctccgtaaaccaaatcttagaccatcaagttggaaaggcaaaagggcattcaccaatttccttggcagggtttcaatcagttgttcaaccttctcctccgtataatgttcaggtaaacaaggttgccatttcccggaaatatatgactgagaaagtttctcaacaacagccaacgttttccaaggtaccccttcaacttcaacgctcttggaccttttaagacatccagagaccttattgtagtctctaatcttataaaccccagcttttcctccatcatcattttgagtgtagtgtaaaggaatcgcctgaaagtaaaatcaactagaatatcaacttcgttcttcgcattatactaaaacccctaaaaaatcggagactcaaaatttccccttttcgtaaaattctcttctacatttcgtcaccctttaacaaaaaacaaaactttacgcgagaaaactcagagaagaacttacatcagatagaatctttctcaattgacgaaggcactcttgttcttcagggcatcgaaacccttgcaattgaaccggcgtaaccgaaaacgaatcaggagaacagatctcgagcctgacgcgaaacttttccggcacactagtactcaatactcgtaccggttcgtagttccgatacccttcttgaggacacacatcgttactaccgtcaagctttcgacatttagctaacctgaaatcttgttgtcgctgtgggttttccgaagaatcgaacgactgctttcgtttctccgcaaaagctaaccgagtcgcttcgtctcttcgcctttgctcttcggaaacctccattgattgaatctgagagttgtgtgaagaagtgaagagaagacattttgaattttgaaacgcaagagcatgaacaagtgaagagcgggtgcgaagaaaccacacgtgtcaactacacacgtgtgaattaaaattaaaatccggttcggtaccaaaaaaccaatcaaaccggatttccaattttataacagagtactatttcgagaaacaaatcttgaactcaagtcatctacaatcttcaagacctctctataaactcagcatcgtagaaaagaaaatatgatttctttgaaaattttacattataaagattcatgaaccaaaaacaaaccatttttcctttaaaccaattcacaactttgatctctttctcaaggacttagcagccttcaacgacttgtgaagatgtggatttgctctgaatcttcttcttctgagatgttctgttgttatcttgaagagagataacagtttcaaaagcaccaaccaatgctttaactttacttttcctcacttcttcaagcttattcacagtctcttcaatcacattattgaaaagtgtctgcaatttcttcttcacttccacttttctgtgtctcagaacaactttctctcgtttaccttcaccgttaatcttcccaacaccttctcttttatctttcaggctcttcttctttttgttcacatcacttgttctgagttttggttcttgaacaactatcttcttgaatttgatcgatgttgtagtggaatcttctggttttggttcaagaactttccctttcttgaaattcatttgctgctttgttggaggaggaggtggagtaacctttaaaccaatccttttcggtctaatcttgctttcgggtttcggattagtaacaagattagcagaaccactctgtttcttctcaggcaaactagtcttggacctggaagtagtctgtcttattggcctaggatctgaccctgtaaccacctctgagggtggaggcaaagatggtaataagctaagacttttcttgccggtgcttcttatgattttcttctcagaagattgctgagtctcactgatcttaacacttttggtgctcatcttcttcttcttcttctcaacactagattcaacaacatacaatgtcttctccaccgcatcatcaggtctaaccggttcatcaatgttcgtcttctctttgttcttcagattctttaaacgttcctctttagaattcttgttctcgctgatccttgaaaccttctgagcatcaagactcgttttctccaatacatcatcacatctaactggctcatcgatcttcgccttctctttgttcttcagagtatcctctttagaactcttgttctcactgatccttgaaaccttcttaacttcaagatctgtcttctctaatacatcatcacatctaaccggttcaacaatcttccccttctctttgttcttcaaattcttcgaaagatcctctttaggacttttgttctggctgatccttgaagccttatttacaacaagattagtcttcttgaccgttctcacaacaggtgaaacactcggactagtactcttggtttcactcttcttaacgtgtaaaccatcacaagatttgacaacctcaccagcagcttctctctttgcagcctgcaatgatgacttgtccggtttagaaacattccccaaggacttcctcaaagtctcacccttccccaaatctccactgtcaacattctttttcttagccaccttccatggtttgatcaccaaatcttcctcacgcctcttcccatgtttacatagatcatgagtagaactcgtttggttcccacggtaacgggtttgaacctgagctttgcctgtctttttatctaaaactcgtgttgaataccgcttcaaactcgcatgattggtctctgcagctggatgaagaacatcatcatctccttgaacttcctcatccactacagggatagtttccacagatatctccattgggtttgcatcatccaaacaacacttgtcatcaacttgtgaaatattctcctcagacattgcaacttattacaacaactacagagaacataatgtactgatcatcaaaatcacaaattttgggagcttaaatcatttaaacaacacacataatgatcctaaactgtttttctcagattttgagaatgaaaagtacaaaattgaatctttggttccaacgtcaataaataagcaattacatcaacaaccaacaacaaccaaaaaatccaagtttgatcatgactgaattcaataacataattaccacaaaaagaaaaacagatttggtttatgatctcaagttttgatcaagactagagttatagtaacatagttgatcctttaacaaaaaaaagttatagtaagatagttctaagaaattacaatgaagtcaactgtgatgaaaatgtgagatacaaatagaaagatgttgttacctttagatcacccaactcttcaataattattttcccaaaaaaaaaaaaaaaactcttagagaactgaagctgaagaacaaaatactaaatagttttgtccagaagaggatgaagagtgtgattagagaatttgagaagaaaaaggagaaagttagatttgattagaagaaaaacaaatgaggtcaacaaatctttaattgaacgaaagagagggaaggagagaatcttttgacaattttttcttctaatattttcagttttggactttattaatacagagccatatgattttgcaatttattctaagtgaccatattaattagtcaaaacatgtttaagatctagtatttcttttgatacaacataaaaggaaaataattgaattatttcatttcatttattaaaattaaactgaagattgaaaatttatgatggtaacaaacaaaattcaaacttaaaaaactcaatagtagtccatataataatactgtgtatattaatatattaagcttttaggttttgacggatcgggagatatggaaacaaaaagtctttttgtatttttctaaagaatgatgccttccgcgatggaccgactttggattcttttgattatatattgcaaaaagataagatctacatgctgacttccaaaaagaacagagatgctctaaataatttctaataattcgtgccatttctatattattcaagtaaataatactttgtaaaatttaatacttttcgtggttgtaaagcttattatacctaaattatattttttttaaaaaatttgtatcaaatgtgctgcaatttagcaacatagaaaaattgtgatacatcaaaagaaccttgttatcaaatgtggttactggttatgcccatttgaaaccaacactatcgcccatttcaatctgaaataacataatctgaaataacattttctgaaagcccaattccgagaaaggccgagcttataacacctgaggcccaaagtttcaatttctgtttgctgattctagaaaatttacaaaaatgtatacattgtgatcatcctacatataaagtagcttaccaacaattcacaaaagactaagctatattgcgtgtaaagcagaaataagtaaaaagaatattacagttttctgaaaaaaacatataggatataacattgaaagctaactattgcctacaaaatacttgttgtacaaagtatcaaataatatatgtaaatgtactttgaaaccggcaaatgatatatatatatatattttttaaatgatatttacatctcttaattttgattgaaaatatatagatagggatatagtaaagagaaataaagggataatatgacatctgtattattattttctttttgatataaaggacagatctgtttcaattgattgcttctgatttaagcatgacacgaggcaatactgactgaaatgtcatcgagtgacagatgcaccgattcgaaccaccttccttccacagttgttaccattcgcaattgttctttctgacaccacaatcttaatttattagttactacctcttttgctcctattatttgtttctttaattgtgtttattttattaatctggatttgcctttttagcataagcaaatacaaaaaaaagttattcctttaagatctaatcctgtttagtaatgttctctagatattattggttatgcaacttgtgcttggaaaatttttaaagtataatagttgaaagtgactttcttttgtagattttgaacttatttgaatagtcatgagatgagaacaaaacaacatacttccaaactgactatgttttgtagatttttaatatagtatcattgtcatattggttttgaaaattgactaacgttggaaatatttctacaaaataatttgtcttttctggtcttaaaagtgagttgattgtgtttaaccaagtaattcatttacaagtaagtgatcattgtgtaactaatgtaacttgagagaaatatactcaaacaaacttcagtagtaagaaagaaaaaaaagagtaaagctaaaagccaaaagtgaatgaattaattattaatatttgtcacaccaatttcgaccgatcttacttgttttcaaagagatgcttcaactgttttgtttgtttctgttaaaccaaaatcaattaacgagaataaaaaggaattaacgaataaaaagtggtagaaagctcatgtttcaagagaaggttttgattcatcaaccaagttgcaccaactccatatatattaccaaaaccaaaataaatttacatatttggaaagacataaattggacagaacatatcaagcatgtaatatacagaagccgacaaattgcaaaatttacctaaaccccatcttacaccaccgtcagattctgatgtaagtattatcaaagctcaagaacaatcacatcatcagaatctaacttatatatcaaaggtccagaattttctccattgaagctggattctaaggtcagttcttacttctttatctcaatctgatgattccatatcgaaagtcttactttttcacttcaatttcaatctgatgattctaagatctttgattcgaggtcgatctctgatagttactacatgtttctgggtttatttatttttaatccatatagtaattaaaaactcttatgaggtttaattatggttacttgagaatttgcaatcgtcatctttctttgactcctatccattttttggtttttcctttgtttaatttctgtttcataattgtaattgtaaattaaccaaaacaaattgatcagaaacctttttcctatggaatatttatcacacgcaagcctgtgagttgtgactctgtaatcacttccttgttctggtaatttcagtggttaaggctctccttttttctgatgttgtcagcaaaagttagtttttcttcttctttaatgggttaattacacctaaatctctggttattaaacaatccagaaagaaaaaaagtttattccttcctctatgtatatagtttcacatgcaagcatcacttgtttgttctgacaaattgcagagttttgagttctgtttttttttttttctaatgttttgtctttaagaaagttctgtttttttttctgcaggaaagttatcaaaagttttgagagctttggatagtgaagctcaaagaactaaacaatgggcttcagagtttgtgttattgtcgtcttcttgggttgtcttcttctagtccctgagaaaacaatggctcaagaaatgaaacgtgcatcgatcgttatccaaggagctcgacgagtttgtgagaccgatgagaactttgtctgtgcgacattggactggtggcctcatgacaagtgcaactatgaccaatgtccttggggttactcttcagttatcaatatggtaatagcaaaatagtaaaggattcacctttcagtctcttcataataacaatgtccgcagttgcgataattttctgatctttccaatgttttacaggatttaacgcgtccccttcttactaaagctattaaaggtttgcacctggcataccaaaaatgttcatgccattgctttgtgtgttcttgaattctgaaatttttaaggatttggatttttgtatttgcttagctttcaagccgttgaggataagaattggtggttcgctgcaagatcaagttatttacgacgtaggaaatctcaaaactccttgccgtccattccaaaaaatgaacagcggtttgtttggattctctaaaggatgcttgcacatgaaacgatgggacgagctcaacagtttcctaaccgcaaccgggtaagctaattcactttcggtttagtttcattaacgttcacattttcctcttttgaagaatcttgagttagttgtgtttgcttgtttttatcgagcagagcggtagtgacattcggtttaaacgctttgcgtgggagacacaaactccgcggaaaggcgtggggtggtgcatgggatcacataaacactcaagatttcttaaactacacagtctcgaagggttacgttattgattcttgggaattcggtaacaacaaacatttaaaaagtcgccttcttttactcggtcttttttcttagctttccttgttctcggtataggaaacgagctgagtggaagcggagttggtgcgagcgtgagcgcagagctttacgggaaagacttgattgtacttaaagatgtaatcaacaaagtttataaaaattcttggttacacaagcctatacttgtcgctcctggagggttctatgaacaacaatggtacaccaaacttcttgaaatttccggtcctagtgttgtcgacgttgtgactcatcatatatacaatcttggttcaggtctggttttgtataatataatcaaaataaactcaaaaccattacttatatatatcatatctgaggaatcatctgccttctctgtttgagtcttgcaggaaatgatcccgcgctggtgaagaagataatggatccgagttatttaagccaggtatcaaaaacattcaaggacgtgaaccagacgattcaagaacatggaccgtgggcttctccttgggttggagaatctggtggagcttacaatagtggtggccgtcatgtttctgacacattcatagatagcttctggtaaaacaaaacaaatatccatttcggatatcttgattttagcccctgatttctattactgaatgaactaaaagaggcatctttggatccaatctttttgaaggtatctagatcagcttggaatgtcagcgagacacaacactaaagtttactgcagacagactttggttggagggttttacggcttgctcgaaaagggaacgtttgttccaaatcctgattactataggtgagagtcccaaacaaaatccggactttgaaattttatggttgattgatcttgaagttttatctgactttttccgccaatctttctctttcggtcgggtttcgggacagcgcgctgctttggcatcgtttaatgggaaaaggggttcttgcggtgcagacagatggaccgccacagctacgggtttacgcacattgttcaaaaggaagagtgagttgctcatatcatcttttatatcgcagtttccaaacgtctttttcggttagagtttgctttaaatgctttggttttttcttggttttaggccggtgtgacattgctactgataaatctaagcaatcaatcggattttacggttagtgtcagcaatggcataaacgtggttttgaatgcggaatcaaggaagaagaagtcattgttggatactttaaaaagaccattttcttggattggaagcaaagcttctgatggatatttgaatagagaagagtatcatctgacaccagaaaacggtgtgttgcgcagcaaaacaatggtcttgaatggtaaatcgttaaaaccgacggcaacaggagatatcccgagccttgaaccggtcctccgtagtgtgaactctccgcttaatgtcttgccattgtcgatgtcgttcattgtgttacctaattttgatgcttctgcttgttcatgatgttaatggggtctctctttgcttattgggaaaaaataaataaaaataaagaatagttgtaatttttttggtaattgtatctaatgctggtgataaatgtatcatttcatatttcaatacaacatgattacaaacctttggttttgtgtctcttcgacttatgagccattgcaagaaagataacaaaagacaagaatcaattcgcagaactgcaagaagtgtctccacaagataaagaagtatcttcactgagtttcttcctctcttcataagcccattccaagccgtgacagtactgaaccggcgggttgaacctactgtcggttatatcatcaggtaagaaagcaccgttccccacaagaaacttgacagcttctcttttccgttctttagctgcagcatggagaggagtccagccacaagcaccagaggttctagcttccatgttggctccacgttcaagaagcaagtccataacttcgatgtgacctcctttggcagcaaggtgaagaggagtcattccttttgatttaggtccacaagctagagcgttcacgtctgctccttggtcaaggagctctttaacagctttgagatcgccttcacgagctttgatgtgaagctgagtccaccccctgtcatctctgtcaacacccgtttccatggaccggcgcctaaatgagttaggccgaaaggacaacgcaaccggctgctcttggagcatcttgcagataaaccagaactgactagaattcacagatgaaagactcaaaggatatttcctaagggaaacttactagacaaggagattctaggagtgactcagatttacataattttggttacaatcttatacaagaatgtctaaagcaggaacactacttgtgggtagaaatcatcaaccaatatcactcagaataagaacttatgggagaggcagattgagatgattcagttggaatggagcaactcaatcaagggaagtgattagcaatgcagtaagggaaagagggattcaaaccagggccaaagacacggagattttgagggatcacaactggagtcatagacagtgaagagaacacgagcatcaactagaaagaggtaggagcttaatggtttctaggaacaaagagaaatcagaaaaagcctggatcaatgggtaaagagagcatcgggccagagtctctatctgcgtgatttttaccagccagatctgccaacaagacaaggatggaaaaaaaaacttagtggattcagataatacaaataagcaaagtgttcattcaaaaaaaaaaaaaaaagcgaagtgctacagaacaagccataaatctctctgcaaagatcgccagaaatattttcagagatcaaaattttaggttaggtaacgaacaataaaaactttagtaacaagtcccaatctttagaatcgaaaactctggcaaatgaacagtatactaagagaattcccaaaataagctgaaattcagaaccacccaaaattcatctaaaaaattctaaagcagcaaagaaactaagataataaaagcttagtgatgaatccaaacaacataaagaccaaatcaatttcacagtaagacgacgacaacgtaatagaattgaatcggggaaagatagaaacctgtaggcgtcgtagcttagcgcggagggagaagaaagagatatggtgaatcaaacacagatttatccttgacggaggatatgaatcaattagtgttttttcgcgggtagagagtgagaatcgtatatcgatttccagatgaagaagaagaagaagaagaagaaaggcgcgtgagtgtgtgtcagagacaaatatcgtttttttttgtttgttactatacttgatccactttaaaatcgaatttgccacctcatattagcttaattaatcaaggcttcttactgttgggcctacaataaaaggcctgaatttggcccagatagattaaaccatatctaatatctttatcaactaatttaatttcaaaaagattttattctattttatcgtacatagtttgcataatatggttagatttcaaattttatatggaagtaactaattttggcagataattggattcataagaatagaataaaatctctatatatttatctatactattaaaagacatcctagaaaatagtataatacaatgtatttcacccattatgcacatcattttgcaatattaccttaaacaaaggctaaaaattacaacaacccccaaaatgataaaacttatataagaatctcatgattgatgctgtaggagaagaagaaaaacaaagaaacagaaccaaagtagagacactcttgttctttatatggattctacttcatcggaagtaaaaatcgtttctcaatgctttgttaaacccaaaaccatccctgaaaaatggaaagagccataccatttatcaccgttggatcttgtgatgctctctatgcattacctccaaaatggtcttctctttctcaaatctgatgatgcaaccaaaacaaaagatttcatggagacttggctacaaaagcttagagattctctagctgaaacccttgtccatttttatccgctcgcgggtcgtctctcgactttaaaaaccgataatccgagatcctactctgtgtttgtggattgtaatgacagtcccggagctggatttatccatgccaaatcggatctaagtgtaagagatattgttggatccaactatgttcctttggttgttcaatctttctttgaccaccataaagccgtgagccatgatggtcacaccatgagtctcttctcagtcaaggtacattaatttattcttgtaatctcaaaatcatataattcacttagcctagaagtttagtctgaacgatagtaatacacatatagtactaggtttacttaacttcttgccatttgatttagagatacatcgaagtattgtgtatctatgtagtcttagttgtttgtatatcacgcaactatgcatgcaataccctaaagagatgaatcttttcaggtaacagaattggtagatggagtgttcattggattttcattgaatcacgctgtgggagatggaggttccttgtggcattttttcaactctttgtcggagattttcaatgcacaagaaaccgataacttgcttctcaagaatcctccagtcctttcacgttggtttcctaaagggtacggtcctgtgtacaaccttcctttcactcactctgatgaattcattagccgattcgaatcaccggtcttgaaggagagaatattccatttctcgtctgaaacaataacatcattgaaatcaaaggctaatgaagaaagcagaacaacaacaatttcttcttttcaagcgttagccgcatttatgtggagatgcattacaagagcaagaaacttaccttatgatcatgaaattcgttgtagccttgccgctaacaatggaacaaaattggatccaccattgtctttgagctatcttggtaattgtctttctgctgtaaagtccaagaccgttacatccggtgagctactagaaaatgatttgggatgggctgctttgaaaatgcatgaagctgtgattggaaacactagtgaagtggtctcggagacaatcaaaaactggttgaaatcatcttatgttttccatttagaaaaacttttgggagcgatggtggttcacattggaagctctccgaggtttaagatgtatgaatgcgagtttgggatgggaaaagcggttgcggttagaagcggttatggcggtaagtttgatgggaagatatcagcatatgcaggaagagaaggaggaggaaccatagatttggaagtatgtcttcttccagagtttatggaagctttggaatcagatcaagaattcatgtccgttgtctcttcttcttcttgatcttattcatataagtttgattgattgtttgtgttgctgttaaagtccaattaatattatgtgacaatgtgttattcaactgataatgactgttatttattaaagattagtacaaactaaaatgtgaggtttagagatgataaagttgatgtctttgtggattactcccactcactctcttgattctacactctacttgtaagaacttagataggaaacctgaaaacagaaccatgaaacagagaaaattgcagagaagtaaatgtgtaagatcaagacttttacgttttcaggtttcagtgtgaaagcgcctactcatgccttgacattgttactcggaatccactattaacaaggtttataatatcaagctctttcttgagcttatacaacaaccatacaagaagtcatctcctcccaaaacacaccctccattcaactactctctgaaccatttgtcccttttgtctcctgatatgttctaacactaagaccagatccaaaacgacacagttctacttttggcaagaatcacgtgacgtccttgtgattgggcttcagaatttgcttgcttcttcttcaaaccctctgtgggaatagtgtttagtgaagttagtagaaacatgcatgtgttatttgattaaagattaatacaaactcctaagactaatgttattcaattagaataaagatcatatatatgatgacatcattgatgatgaccagcatatcaaattgtgcaggaacatacatatagatatgatgacatcattgatgatgatagctatctataatcatattatatgaatatattatttggattgtttatgtaagcgagtataaaccaaagtaacaagataaaagggaagcaaagggaccattgaaagaaacaaaagagtcatattatacacattttttctctttttttttttcttcttgagaaaaatggattcctctccatcagaagtaaagattatctcaaaatgcttcgtcaaacccaaaaccatacctgaaaaatggaaagagccataccatttttcaccaatggatcatgtaatactctcaatccattacatccaaaagggtcttctctttctcaaaccatcgttttctgaatctgtcacaccaaaagagttcatggagactttgctgcagaagcttaaagactctctagccatagcacttgtccatttctatccgcttgcaggtcgcatctcgactttgaaaaccaacgactcaagatctcactcggtgtttgtggattgtaataacagtcctgctggatttatccatgctgaatcagatctaagtgtatcagacattcttggttccaaatatgttcctttggttgttcaatctttctttgaccatcacaaagcattgagtcgtgatggtgacaccatgactctcttatcagtcaaggtacatttcttcattcttgctatatcatattattcaaatatgtcagcagatttgtagtaataaaagttaaattgcttttactaatgatttattgtagtagtgttttactgtgtcatagtgaaaaaaagatgctgaatctttttctggttatacaatgtaacaggtaacagaattggtagatggagtgttcataggattgtctatgaatcattcgcttggagatggaagttccttctggcacttcttcaactctttgtccgagattttcaattctcaagaagataacaacaagtttctctgtctgaagaatcctccaatctttcgtgaagtgtccggtcctatgtacagccttcccttcagtgaacctgatgagtccattagtcaatcagaacgtccggttttgaaggagagaatgttccatttctcatcagaaacagtgagatcactaaaatcaaaggcgaatgaagaatgcggaacaacaaagatatcttctttgcagtcgctgactgcattgatatggagaagcattacaagagcaagaaaactaccaaatgatcaagaaactacttgcaggcttgctgctggcaatagatcaagaatgaatccaccattgccgatgaatcactttggaaattacatctctcttgtgatagctactactacaactggtgatctattggagaatgagtttggatgtgctgctttgaaactgcatcaagctgtaaccgaacacactggcgaaaagatctctgccgacatggaccgttggttgaaggctcatttgaaactagatggatttttcagtccaaatattgttcacatgggaagctctccgaggtttaacaagtacggaagcgagtttgggatggggaaagcagtggcggttagaagcggttatggtggtaagtatgacgggaaggtatcagcttatccagggagagaaggaggagcaagcatagatttggaagtatgtctacctccagagtgtatggaagctttggaattagatcaagagtttatgtctcttgtctcttcttcttcttcttcttgatctaatattcttattcatatgtgctcccatcatatctctatctaaactggatttgttagattggagtattttgtgttgctgttaaaactcaatcaatattatgtgacaatgtgttattcaactgataatgattcatgtttatgaaaatattaatacaaactagtatgtgaggtttagagacgataatgttgaaatctttggggatttattctcactcactctcttgatacaacactttattttataacaacttaaaaatgaaacttgaaaacagaaccataaaacagagtaatcgcagagaagttaattagcaagatcgagagttagtaaagctctttcttgagcttatacaacaacaatacaagacttcatctgctcacaaacacagcctcaattcaactcctctctgaaccttttgtcccctttgtttcctaacatgttctagcactagaaaccatatccaaaacgacacggtttactttaaccaagaatcacgtgacgtccttgtgcttatcacatatgagataggcttgggcttcagaatttgcttgcttcttcttctaaccctctgtgtggaaacagtgtttagtgaacttagttgaaatcatgcatctgttatttgatattgatataaattaaactaagattaatgctattcaatatgacatcattgatgatgaccagcagatcaaattatgcaggaacatacatgttcatgtgatgacatcattaatgatgatagctatctataatcatatgaatattttatttggattgttctataaaagagagaataaacgaaagtaagaagataaaagaagaccaaagaaacattgaaagacacaaaagagtcatattatacacattttttttcttcttggaaaaaaatggattcttcttcatctgaagtaaggataatctcaaaatgcttcgtcaaacccaaaaccatccctcaaaaatggaaagaaccttaccatttttcaccaacggatcatataatgctctcaatccattacatccaaaagggtcttctttttctcaaaccatcattttctgaatctgtcaaaccaaaagagttcatggagactttgctgcagaagcttaaagactcactagccatagcacttgtccatttctatcctcttgcaggtcgtctctctactttgaaaaccgacaattcaagatctcactctgtgtttgtggattgtaataatagtcctggtgctagatttatccatgctgaatcagatctaagtgtgtcagacattcttggatccacatatgttcctttggttgttcaatctctctttgatcatcacaaagcattgaatcgtgatggttacaccatgagtctcttatcaatcaaggtacatttcttcattcttgctatatagaggtctcttatacgtgtgtgagttatagtataagaaagatgctgaatcctttttctggttctgtaggtaacagaactggtagatggagtgttcataggattgtctatgaatcattcccttggagatggaagttccttctggcagttcttcaactctttgtctgagatcttcaattcacaagaagaaaccattgggaataacaacaacaacaacaacaacgcattgctctgtctcaagaatcctccaatcattcgtgaagcgaccggtcctatgtacagccttccctttagtgaacctaatgagtcccttagtcaatccgaacctccggttttgaaggagaggatgttccatttctcatcagaaacagtgagatcgctgaaatcaaaggcgaatcaagaatgcggaacaacaatgatctcttcttttcaggctctgaccgcattgatatggagaagcattacaagagcaagaaaactaccaaatgatcaagaaactacttgcaggtttgctgctggaaacagatcaagaatgaatccaccattgccgacgaatcaatttggagtttacatctctcttgtgaaaacgactactaaaatcggtaatctactggagaatgagtttggatggattgctttgaaactgcatcaagctgttaccgaacacactggcgaaaagatctcttacgaaatagatcaaatgttgaagtctcctttaccgttgcaagcatatcgactttccaatttgaacatagttcacatgggaagttctccaaggtttaacaagtacggaagcgagtttgggatggggaaagcggtggcggttagaagcggttatggcggtaagtatgacgggaaggtatcagcttatccaggaagacaaggaggagcaagtatagatttggaagtatgtctacttccagagtttatggaagctttggaatcagatcaagagttcatgtctcttgtctcttcttccacctgatcctattcatattttccagacacaaaactcaagttattctttatttcaaacacaaatctttggaaccaaatgtttgcttgttactctaactgtattctgcagttgttaaatgtttccacttcattaagaaaagaactaatatattgaaaatctatgtttgactttaagcaacaaattcatcagaagaatggggagaagcggacgagcttggttatgaacagagttctggctacttttacttccggagtaaatagcgagcccgttggttcgattgcttaactctgtagttgagctcatcagcattatcttgaagatgatccagttcattggtttgcctgcgattacagtgttgccttcagaaacgagaaagctcttagagaatatgtatacatatagagagacttgatggaaaacctttcgattgctgttcccatgtccactgccatatttttcaactcgccaagaagagcgcttaagtcggtaagggcttcatcttgctttgcaatctccatttgttaacacagcatgatatttagaatcttggttaacaaacaaaaagagacgacttttgaaaccccagaaggaacataagagagaatccgaacctgtgttttctgataagcatcaacggcttcaggaagtgtttttgattttggtttgagtgaagggttcagtcccagcttttccctagtctttaagtcgataacttttctcttaggtgaatcacctgctcaggaaatatgaatagctagataaattaataagcaaaagactcattccttagaagtaaagatcatcaaccaaagaagaataaacctttggttatgacagggccagttatagaacgagacttctttggcttccaagtccttgaaaaaacacctccgaggcgtccaagaatcttctcaccctgaaaccaaacaaaaaaaacatacaataaagatcatccccaagaaagagattgcaaaacacctctctggtcgtatgtgactcacccgagaaagatgatgatcgagatcaaccgtcttctggtgtgttctagtaatttgatctccttgttcattcaacataaccaaagttttagaagcatcacatctaatctcttcagcaactttcaaacacccttgtacggttttcgttgtttcctcagagttatacacagcgtagctctcaagttcttgaaccgtctggttctctttacctcccgagggcttcaaggatgaagtgaatcttttctcaacctccttgtcatcatcatcatcatcaaaagggttcaaactgaaactcttagcagcctccttctcatcatcaaaagggttccagctggaattcttaggagccatagaaggttcaggggaaattctactgtatcagagaatccaaaactaagaaaacaacttctcctgcagaaatccaaaactaagattgctattgatccttgattcgaaatttaccagaagatactgaactttgaagttgaaaaaaagcaagaacaagtatttataactgctatctcttttgatcaacgatcgattcctaaaagatcaattttccaacaatcaaagtagacctaaatcgacttggaagattacgagaagaaagaaaaaaacgaattagtacctggaaattgaagtaggattgagaggttccgagagagaaaggttgataggaagaagaggctttaacgagttcaaatattggagtccgttatagaggaaactggtgagaaaccttagcaaaaaaacacaattgttgaaaaagagttttcttttgttcctatttatttactttcttgtattaaactatttatcaataaaatctaccaagagtaattatttttgttttcttttagataaaagtacaggtatcgttaaagaaaaagaaaatgtatacagattttatcaaagcaacttgataagaaaaatgtttgagatttcaatttataaagaggaaaagaacataaggtatggaagaattggttggagatcaattttcaatttgctgcagagtaaatatttagagacttgttaagacatcaaagaaaatgcaattatgtattaccttagaacgacttttatttctaatgtttgttccaagcaatttttatgtacactcagaataaagaaaacatcaatctctaaagctaaactcttaacccaaacttcttttgtttgcgtctccaaacctcttccaagtctctggatttcttctgactaccctaccatttgatttctatacaaatcaacatccaaacttgcaatccgtctttcaatcactcgagcactttccacactcagtttcaacagaaaacccatggatgagactcagaaatgtgtgtaaaggtaaacatcaaagctcaagacttttcataacccaggaagaggcagcatttcattggaagcaggcttttttacatctctcttgatcttaacaacagaggaaagaaaagagagattagattccattttcacatattcgaccaaaaacaaggaagcattacataagtagtacctgtgcttctagctcggatattctctgtaatgatgcttgttctatgcacacacggcgattgcgttcctcatcaagcaaacatgtcatcttataccttaattcagccatttcttgtgtaaggtcttctgcttcttccttcgccttcagtttctcctgtttcagttcttcctgcacaaaccaacaaccgcaggtataactagttggattctgtaatggtaacaaaggaaggaaatagagttcttcagtttttcaaaagtactttgagttgctttacaacatcttcgtgctgatgtatctgtttccccataccctccactttatcaatcaaattcacattctgagaaagttctagtttcttcatgatagcatcaaaacaattgctgtgagacacaaaaccaacattattagggacggggataactcaatttgatgacttaataaattagccttaaactggagcttaccgaacttcattagacactggaagcacatggctcagttcagcgaagaagcacattgcatttagaggctgttcatcttcactttctaaccgttctttagtactttgaaagaaatctttgatactcttttcagaggcagtaaatttctccctcaggtcttcgttttgcttttcgatgtacttgacattctcttttgccctttgagactgaaactgggactcttcgattattccttttaattgatctttttcttggatgctttcttcttggattttcatagcgtcaaagagtgcttgctccaacgctgttatatcaagcttcatgctttctatttcgcacaaggactctaatgttaaggacgagatggtctcttccagtttctccaatgtaagagacgaacactgtagttctatttccttgctctcgagttcttgcaacaacaacaaatgctcggatttagacatacacaactcatctcttaaagagttaacttcttcttccagattccttgattcagccaatttgaactcaagatcgtgcagatgttcattgagataattcacttccttgcttctgaaaattagttgatcccgcaagtaatctacaaggcgaagattaatatatgctgaaacatattattattagttcagaaaaatcaagactggttggcttaaatagaaaattaccaatttccttatagcaattcaataattctttctccatcatctgaattcttgctgtgtcttctaagcgagattcagataatgacttcgtgtgaagttccaacctctgcggtgaagagaagattaaggtccgaaaactcaaccaacagaatgagaaaatactttccctgaattgctcatattaaacaaggagaagaagactactctgactagttcaatactatggggctgtgattctctcagcaagtccttttgtttccttagctgccaataacaaatcaaagagcacaaaacaaaacagaaatcaacttcagcaatctaagagtcagaaactaccttataatgagcatagcaatgaagtgtttacctccctgcgtgtagtcccaatctgcaaaagatcttcaacatcaaacgagttctcacaatcacttctggaactacacgccgagctactgcttcccgagaaactccccgagctactcgacatttagagacaaaaatcaccactgcaaaggcaatgaatcattagcaccaataacctatagaaacactttctacaactaacttcaaacgaatccaagttttcattccctaaatcaaatcagatttttctttcagtttatctttccacggaaatcaaattaggctataaaaacacttacaacaactaaatgaagaactagagaagacgtcaacttcacaggtccaattattcataaaattagatgaaagccttgatgcttctactcgattcctttgaagtaattggggaaaacagtactacacacaccactagatagccaatttcaacaacgaaggataaaaattgcaaccacaaaagaaaaagcgaacacgagaataaaattgatgagcgtacacacgaatacaagcccaggaaacgtttaccttcgcagctcaatccctctctgagataattccgacggcgaatttgccggagaaatgatgtttgaatttgatgatcctccaaaaaaaaaaaatgtctctcggtttcttcgaagcgatgccagcccagataagtaaaaatgactctctgctttgtttaaaaaacaaaacccggtcaattccggtcgggtcggttcgggtcaaactagttattatttcggatttggtttatgtactgtgagagtgagagatttttagtaagcaatccctctctagtaatggcggtcgcaatacctcaagccacttctcttacgaacctcgtcttcctcacgaaattaatcccacgaggaagcttcaccaccatactacctaagcatcatcggaaaccaatcttcgtattctctctccagactcaattttcttctccagtaaccacactcacctccaaaaaccctaaagatgatgagcaacagcaaaaactctccttcaccctcaactaccttatcgactcatgtggactatctccagattccgccaccgtagcctctcgtaagctcttactagattcaccagaacgacccaacacagttctcaaccttcttcgtgaccatggattcaccacagctcaaatctcatctctcgtcaagaaacgtcctgttctcttattagccaatgctgaatctgtcctcctcccgaaactcagcttctttctctcaattggtgtctcaaaatctttacttgctcgaactttagcttctgatccaaccattttgactagatcccttgttaatcagcttatcccttcttacaatttccttaaaagcgttcttgattccgatgagaagattgtggcggcgttgcggaggacgacttgggttttccttgaggatcacactaagaaccttgtcccaaacatcaactatatggcggagactggtgttcctgagaaatgtatcaagctgcttctcacgcattttcctgaagctgtgatgcagaagaaccatgagttccaagcaattgctaagcaagctcaagagatggggttcaatcctcaaaaatcaacatttgtgttggccattcatgctctctctgggaaaggaaacaaatcgatatgggacaaatgttttgaggtttatcagagatggggatggtcggaagatgatatcatgtgtgcgttcaagaagcaccctcattgtatgatgttgtctgagaggaagattaacagaacgatggaatattttgtgaatgagatgaatatggcgcctagatcgatcgcacagtgtccagtggtgctcttcttcagccttgagaagaggattatcccgaggtgttcggttactaaggttttggtatcgaacgggcttgtgaaagaggattggagcttgacgtctttgttggttccagtggagaaagtgttcttggagaagctcgtgatcaagtacgaagaggagttgcctgagttgatgaatctgtatctaggatgcaccaaactctgagcttttgtttttgactgttttcattatcaaatgtcagatgctgagagacatgaatctttgtgaaaagagtctagtgtgtaatccaattttggtagtgaaaggaaagctgattagcaagcccaacgtgtgttttaaagacagaacaattgaagacttgcatgtagaagtagaatcgtcatctcaatataagggccaaagccaagaatcggtctgcctatatgatttgtatacacacacgcacatatacatatacagacacgccttgatagagtatacaaacgtacatatgtatgtgttcataagaattggtgtgacagtaacagagattctaaatcttgcagacgagagaaagagagagagagagttttacaacaatatttcttacacgaaacgatgatcctcattcaccgaaccgacctgcaaaaaacgaatattttatcatcagtgaggaataatacatagagactaataccaaatctatctgcactagtctaaatgaacttacaaagtaaggagatgtgaagacagttttcatttatcaacgcctacatcaagtgctttagagcccatcatcacattcgaatcgatttgcttatcaaatttcttctttctcctctcttcaaagtcttggtatccttccatctatccatttttatataaatgtatgttacacaaaacccaattcaaacaaacaactttaaaaagtgttctttcgaggttatggattattgaattaccagctgaaactgatccatggaaataggattgttatgcaaagaaaggttttgcagactcttgcaatgtatcagcaatccatctggaatctggaaaacaacaagtgttacagatttcaaaggaagaagatagtgattcaataaacccaaaaacaaaaaaaaacacatttcaatctgtttacctggttcacttgattattgtctaaggaaagcgactttaactgaatcagattgcagagtgatgcaggaagctcttcaacaacgttatctgcaaggctatcccgaatcacgattaagctttggagaagaaacaaccagaggaatgtccagaacaaaatgtcaatagaaaaaaacataacacttgtttcctaaagagttttgatgtttctgaatcacctaacaaaaatgggggataaaaagaaacagaatctaaagagcgaaactagaaacataccattagcctgtacttcttctaaagaagcacagctccctactgattcaggaagggatttcaatctgttatttgagacattcaacagcagtagctgcatttgattagagaaagcttgttaattatttcagggagatcctagagctatgctttggtaaatgaagtcacttacattgcggagactaccaatagtatcgggcaagtatatgagcatatttcttgagattgatagttgctcaagccttaccaactggcccactggaaagcaagaaaaatatatgaatacgaaccgtaataggacacaagttgttttaaaattaacaaatagtgtacttgtatcaaagagcatcttacattcatcaggcaaacagctgatgcggtttccatcaagcatcaaaactttgagagattgaagcttccctagattccccggaaggcgctcaactagattatcagctattaactgccaaaagtcagcatgatgggaaagagtcaaaatccacagagaaagtaccaactagcattccattgagtcaaatactgtgatcatagctaatacaagatacgacgaaatatgcagataatgtacacagagaggcaaagtttcctcaccagacgctgcatattgattaacttgctgatttctccaggaacatcagctgcataaatatggtcaaatacaaagtccctcagctattactcttaacacgtcaatgaagaaagaaatcaaaatgaagcagaaggcataccaatcttattgtgtgttagatcaagtgttcgcactgctctctccatttcaatcacttcatcaggaaatgtctactcaacaaaacaaatcaaaaaaacagaaaattcaccaatcaagagataatcagccaatccagtcttaacaaaaccctagaacaaattcgtatgctgcattgatgacacaatcacaaagttcagtgcttttcgtctctatcaatcattcaaacaagagacaataacaacaacacacatagaataaacatctctacaaagtcatatagacagatagaaacaagtttgtcaatcaattccaagtggagacaagtataccttcaatttggagtcgcggagaccaacaatgcctgtagatcgccagcgtgagatccgattagcctttgaaccaccagctgtattgctcgcgcaacaccccatttttgtgtttccgattcttcgccgatcgtcgcagtagatttcgattagatgatttatataaataatgaagaaatctcagatacccagagaaagtttcaaagtaatctgattgctaaaagagatggcttttggggtcaaaatttggtttttgaggtttaggtgagggtcaaggtctctgtctcgctcgcgggttatatagaaagaaagccaaattcgtccccaaaaacagaaaaatataatttggaaaagtaaaaagaccctaaatttgataaaagtgcttagctttggaaactcgaagatcggtaagaaatcaaaatcaaaatcatttcgagccccaagactcaaatactattgagtcaatgaactaaacttcagattttatcttggtattggtgatcccactaatcaaatcgagggaaatttcagatatctatgttaccaaagactcatttttgaagtacttaaacttgtcttctgaccacattacctgtcttgtttcttacataacctcttacctttcaatcatacctaaacattttgtttgcaaaatctttcttttagtggttctatttttaaaactttcgttgttaaacgtctttttcttggttctaaacttctaactaatgatagtgttgttaaaccaacgtatatatgatattaaccagaaaaatggcttgttttattacaagaaaacgaggtttcttttgatatatagccccttcctcaagcaacagcatggtcggactaatttttttttttcttttccatttattttattctcatacccatctcgttaaatttcaaaccaaaaacactaataactcaaattcgaaaccgaccagtcaaccaagttatgaagttgatgtgaaaagccaaaatgtgaagtcttttgacttgatatcgtttgtattatatactgaatatcaaagaactcagcccataatttcaaaagttttatgaatggtaaacattaggaacaaacacgcagcaaaaagaacaggaagtaagaagcctaataatactatttctagaaaataatcacaaattaagaacatggttcatctatatgtacatacatgattcttctcaaaattctatttgatatagaaaaggaacccataataataaaatatgagaaagacagagataattaaacacgttttgctttcattcactatgagaacagccaaaaatctaggaaccagattccaatttttggttcctttttcctacttccacacagaacccgctttgtcaatcagcggatttcgatcttcaagactttttaacattcccttcattaggcagaggtacaagatatgtaaaatacacgcatttgtaaatatttgtaactaaccagtgatgattgattggttgttgaagagggaaggttttgtcttctgtcttttctttttttttcccctgttttaagttagccgtagagccatttcttgaagcagcgttcgtttctgagaagcgtttatcacttgattggtttctgcattctctagaacatctgtgattatagctgctgcgtgacccagtggctcttccgcggctctctttagcatgaaagcctggtgcaagtgaaggtaagtgagaaaactaaaaacagtttcacaaaaaatggttcgagcttttagaggagttaagaaaaaacagaagaccacaaacttttacaatctagtgcaactttttctcagtagaaaacttgatttgaatccagaatctaagttagggaaatggagagaagaacctggccatggtgcgatatggttaaggtacatggttgctgattccaaggctctccatcaatttgcactggtaaaggcgcacaaagttgtatcttgactgctgacccttgagctagccttctcgcacgagacaacccgacctgaagatgtgaaaacaaaacaaaaatcaatttatgttagtttttaggttaccagtcaaatgtatacaaataagacataagagtacaaatataacctgaagtttcccaaggtgccatgtcccagatatactcacaacttcaactatcttgtcgtgcatcgattgcggatcaaagttttcatatgtttcatcttcattctgccataaatccacccctcccatgtaacttccaatgtttgcaaccagtattccttccgcatccttcagagatttagcatagagaagttagagcattaattatcatgcgggtcgtatctgtaaggtatctgtgactcacctcaggaacctcgatgtcaacaccatccacctcaactcgaacttgccaagggaaatcttcgaatgttctgtccattatactccttgcaccttctctggcatagaggactttgttcataaactgcacatggagaccattcaaatatcagtttcatggactaaaggattaaccatacagcttctctacaatatatgccagttatatcatgattgtgaaatatagaaatacagttttcctgaggttatatcaaaattttatcaattaatgttcatttggttacctggctataaaatctctctggattctcctcccgtagattgtgaatctcaagggcaaccttagcatcacacccaacccctgttaagattagcaaagttagcaacaatttataggctatgggttcaagatagcagtcatatcatttacaagggtaatatacacaacgggaatggttcaaaccattcttcatgaatttatttaaagaatctatcattatacaattttaatttatatagactttaaatgcaaactgccgtgttaaattgtaaataattttaaccccgagataagtcttgataagagtaatatatacgggacaaaagttgcaaacagaactaaaggactctggatacaaatgaaactgccccactacttcgacgattagcaacctcacatataattgaaattatatcgaaagcaaagctgtgaaggttttcacctagaggttttgaatttaactgacctatataattgttcatatattttggcggctggagttgctttccttgttgattcagaatcgatactttccaacgatcaaggacagtgactgcagcatgctctatgttctgtaatactgtcgacaagcctccttgtctctcaacagaacccaaaccaccaccccaatttaatactcgggatagatcattcccggttccagcaggcagtatagcaactgcaggaggagaaataaaattctgtttctctatggcatctaatacccaaccagcggtgccatctccaccacaaacaagaactctaaagtgaggaaccttcctgaagagaaaaagtcccacttctggtccctgcactgaactcaattcaaatacctgcaagaaacggctcgcgtcaataaactttaaagactacagattaagaaaatgcattgaaaatgtccacagaatcagatttaagtctgtgacgagttttcaaggcagtatactctacctgcacaggatttagatgaagatgaagacgttgacgaagggaatcacctcgttgagcaccactctttttgttaataaaaaccaacaacggtcttgcatctgaaggcaaatcagctagttcatacttaagtttcgaccttagtgcatgatattccttctgaccaaaagacccggttcttttaacactcggcttcttttccagcttgccattgctgtcactgtccccgttagaagaatccccattcataacgctgatagaattttccagtacggcatgagcgccattaacagttggacctgtatcagctgtgctttctgtggattcatcgcaattgctaccactattaccagtgtcagctgaagtttcattagtttgcttgtattttttgctttgaatcctgatactggcaagggcggtagatgcaagttcgttagcaccatgagtgattgagctcagaaatcctccagagggattccgcgtcaattccttaacgtagagtgggcacaatattaaccttctaagcgggcctaaatcacaaatgtcaccagtttcatttgacatgttactgtgacagtcaacgtgcacaagacgttgacaccacaagcagcaccatataggagaacccccaagaaaggagctactacatgactcgtcacagtagctacaaaacgaggagtcatcagtctgatcagccccttctgtccaccgcactgcccactggtgcaccacatgctcaaatccaaccatggagacacatttgcaatcttttggcgcacttgaagaacagttaaaatgtgctgctgctccacagattgtgcacctgtggaaaaaactttctgaagctacaattgcctgagatggcgacatggacttcaagcaaacacaacagttcaagtttttcgcacgagctatagggtcgagttcccagctatgtggggcaacaggaaccttatgtcgtgcctttggatttttctttgacctggctatggctttcgtccaacttaaattaatatttcttcgccattgaaaagcagtgtaggcgatggtcaatataccaacaagggcagcaacaaaacaagagaacattaaaccacgagattcaaccgtgtcaataggattcttgctggtccagctaggaaagaacatccccaattctccatcgtcgtccatttgtctatgttgcaactctactacaagtgtgaaaatccctgaaatccgagccaataagaagccccaaaaagattattgtattggtcaggtccacacacagatcatcaaaaattcttcctcaaactccatatcatcatcatccatcaaaccagtttatgctcagaaaaagcgatatcgcagaggacaacaaacacaattcaactaaagaaaaacaaactcttcttccctgacagtaagaaaaaaaaacatgtcatccaaccgcataacacgatagaaacaatcgttttcataagaaacactgcagcccaaattacaaaggccctgaacaatgtaaacaaaaacaaatttactacaagaaaattaattgtttggtcattttcttcctcggattcagacttcaatcaaacaatcgtaatcatgcttggacaacacattcttaaaatcaaaatgaaaccttgctctcaagttcctaagtttgatacatattgatgaaaacttactctgctcatttccaacaatactataagaggcaaaacaaaacctttaagcttcgactttaataaacaaaaaaaaaaaaaaaactcgagctctagtgaaaaataaactcagatcacaaagttccaaaaatctcctattaaaaaaaaaggggcaaaaactgcagctttctctctgtccacgaagatccaatgtaaattacaccaacaaataaataaaaaaactaacctgaagaagcgagagggagaagtagaagagatgatcaaatcagaagcctaagagagatctagaaagcgacccgaaaagcgaaagaagaagagaaacccacaatcgatgatgcaccaagcacgaagcttttttactccaacgaaaattcccaaatccaaaaattttgattttgaaaaagcagagatgctctctctttcagttttcttataataattaaaatctttcgtttgattaattcgatcggactatatacaatatgatttgtgaaaggagaaagattctgggcgaaaaagagggttaatctatcgtatccgttttacacggcttggccacgtaggatatatgaatctcacagttcctagttgccacgtgcccatacattttttgtcggcaaagggcccaggcccattactttcatgacacggttcctaaattacttgtactatgtgacattgacccaatcaaaacagaagaaaacatatagaattattcttttgggatttattaattcaatacactaaagggaaaatgtccaaatctggtttttgacatccaaatgtttttgattgtatgcttttgtctaaaatacatttggcaaaaaaaaaaggaaatgcgattgtgatgttgatttaagtaacaaaaaaaagtgttgatgtgtaagacatgattctctctaccactgcatttaatgttaagaaattttttttaaaaatgatatatatctacgcaaaaatattaatattttatatactaatattctttacgagcaacctgcagatacatattgatcaaattcttaacttaatatgtaaatgttgactataaatcttatccaagtactccccatcgaccatacggcattactagcaagaaatccttttgcagcatgggactttactctttgaagtatatgtcactatatattctcctatatatgctcgatccttggactaaatctgtggtactcgacccgatcgatctactccactgcagttaagttcaaaaatacaacacctaaacatgtgttttttgatgatattggtaatttaccttgtatcacttggtacggtgttaccaatctgcttttttagatcatacctttagtagataacaaatatgagaactacataatatgtatgggaatcttaagtaattgtttatgatatgaacatcttcagtttcgactaaacttttgattgctactaaatacgtatagaacaaatcttcttaattatatcttataactaccgtttcttaattattacaacaatatgtcatatgatccaagtctaaactataaatgtccctttgaaaacggacacttcaagtacagctatatcacaaaagatttggcaaatctaagtacacatttagatttggtaaatttgtacagaatcagtgtgttccatttcaacacctaaaaatatagtcacttttaaaaccaaaaataaagaaaaaaatagtcatatcaccgatgcttagcttgatcatcataagcttagcttgatcatcataaggtactgagcctcacggatctcgaggttagaaataagaagagagaaaaaaaacaccaaatcggacggttaacaagttactgacaaaacgaaattatgaacctgagagagtagacactagtcttcggatcttctagactaagatatcaaatctgtttgttattagaagataatatatataatgaaccaaacacaaaatcatttctgctctccataactagaacacctccaatggcttcttccgatgatccagctccggagaacaaccacgtctccgtcttagctagacaagctcgaaacccaccgacacattttttctttcctcacaatccttctcctcgtacttactacttctcggcgccaccacagatttatttcatctccgacatatatctccctcctcctccatcaatatgggtgtattatcctctttggtatattaaccctaaccctaatgtatatgagtctacacaagaacttcctcaacgttactctccaaaccctagccaagagatgactcttccaccgactagtagtagaagagtttttggccggagaagttacgaactatgtgagaaggtgacatggaggacaagtatcaagccggaagttgaatccaacggtgatcacatcacaaccgtcatgcttcgcaatataccgaaccgatacacgtgcgtatataattccttcattttaaattcataaccactagattatacagtatatgttagtatttaaacaaggtgtgatttaatttatttattttgttgtggtggtgaaatgatgaggcatatattgaagctaatgattaacaatatttgcaggagagagatgatgattcagttcatggataagcattgcgaagaagccaataaaagtgggaaaaatgaagagtttacaatctctgcttatgattttatttaccttccgatagactttaggtaagttttaatctttattattattcgttaattagtttcatctttgtttatatacaacgaaatgatgctatatatacaaatcataatcgataatcattgaatatctgcatgttacaacttacaaatttttattttgtgcattaatgtatttgtaatataagtatatataacaatgttactattcatcttgatattattaacttgatcatatataaattacctaaatgaattaaacaggactacaatgaacaaagggtatgctttcgtgaacttcacaaatgcaaaagcagtgtccaagtttaaggctgcttgcaacaacaagccgtggtgccatttctactcaaaaaaagaacttgagattacttatgctagaattcaggctagttccactcctttacatatatatatacacatctttgatctgtgtatcttatcttattcaatcttattgtaacacttgtcggggaaaacaacaatacttttgtgtagggcaaagatgagctggtgaaacgtttccagcatatgacatatccggaggaggcctacagtgcggtatgtttcagcccagctcgtagcggagggaaagatacagttcaaaccacaatggtcggtaaatgcaatgaaccagtgtgctcggtttagtctttccatatatgtaattaggattatgaataataaaagtgtatgcgatggtgaacatgggtctaggatggaaaagaaaagactcagacaccgaaccaaatccaagtaaaattctgaaatgtttagttttggatttggtttttgatgtgtgtgagttttgacttttcataattagtgttatgtttaagcgtctactactctacctgtttctctgatctatatataattttctatgttgttgaactgttgtctggcgatgtttatatacaaaaatatagctatggttttctctttttttttttttgttaatgattattctgatattcaaaaatttggttgaaagttcttttttttggtgaaaatcaagtcatacttcattccagttatagagaagacaaaaaaatctttctacaatgaggattgtttttgcaccaattaattttttaaaggaagtaagccacgaactcttagcttagaaggtgatcgcatgaaaaactagctaacaacataaaaaaaaaaaaaaatgagttggccaaatatcgccggtggatattattagactacgttttcttgtcaacggtggatattttagatataagactttttggaacgtaccaaaaagtttctcttattcctttgaactcgcattatgttacaaaatataactagagaatcttgcatagaaaggtttgcggttttgtcactattttgtatgtgtactactgtactgtacattgaactgttgtgatcttttcaatcatgtaaaaacctactatagaccttagcctattctggcgttacctttacacattccagtttttattgagccgaaaccatcattgttagtttgggtgacgatagattctgcagtaccttgacacaaatcttcgtttcttggggaatggagcgacaagtgtgacgtagatgtgcatcgtaggctcctacaaataatgaccaaaaaggcctttttccatcaacaattgcttctttttcttttctctctttttttgccacttttttccccactatggtcatgagtcatgaccggcttcacataaacgatgttgaatcaaatagctttttgggcggggactgagtggaattaaagatgatggattcagttagggttttgaggtagttcttggcccataatatggcccaatatatgaattttgacttttttcgaattatcgttgaagttcatctcttaacaataataagcaacaactttatgagataatgaattattgcaatacaatgatgtagaaacggaccaatacagtgtcgtgtttgacgtttaggtgggtttggttataattgtcttatcactggcccacactacaacaacaactctcgtctaaaaccaaaccctctgacatggaaagagagttttgatctacgagccaattgctttggacccgagcctcgtatttgcctccggacccgaacctctgtttggctcctccgctcgccgttgaaaaatttccgcactgatatcgatcactttatctctctcccttctctctctctttctcttcttctcctggtttcgttaattcttgaattcgaaaaccctaaacaacttgttcctagaaattgagcaagcaaaggaaagctttttttcatcttcaggtttccatttgttgtaaagctaaacgtgacacaagtgtgtaagttcacatctctgtttccctctgtggaaaccctaattcttgctatatatcctaaaaagaaatgatttttttttttacccaattattgtaccgtgtcgataggtagtgttattgtttgaggttgaattctcggttactgtaatgttcatgttattattaaccatagcttcgatttgcagtgagattgtgtttgcggcaattttgatctcaagtgtgttctcgagttttccaatcaaattctgtatttttttcgaaattagcttaattttcagctgccataagagtgtttatagctgtgaaatcggaaattttcagctggtttttgtttaatgaagttgatgctgtttactgaaatgagctctccaagtttacttgattaggtgttaagagtttctgatgttgactggaacttaggcgtcagtgtaccctaagttccaatctaaggaaacaatgcttattctgtttccttgtaccatgtgggctctgcatcaattctctagtgtctcactttgctgccctgtggtttttgtttcctctttgcagaaacaacacttgtattggctttcttctgtctagtgtttttgtttcacttgttgtgttcaactctaaattttgcagtatctgttttgtttgtttagcaggagaacctatgagtattcaaagcatgccaattggaggtagctcatgaattctggggaaagaggtgtttatatgttcccttttttcttacacattcggaatttagatcaacgaaggcgcaatgttgaacttgtttctgtgtttttttcaaaggctcagataattacaaataatttagaggagctgaatctatgcctggaaacgaatttggggagaagatccacaatttttttggacaagaaggcctatcccaagaccagcaacatcagtctcaggttgttgacagaagctggtccagttttaataatggtctagtcggtaaccagaggcagattgacccatccctcattgccaatctgaagagttataacacacaacaatctggtactgattttgtctccttttgacactgaattccacaacttgcaatcattaatagctacatatattgctagttttctaaatggagcttttttttttttcttatgtcagttgatcatgagagaggtcatcaatcttcaaattcacagcatggtttaaactatactcagcagcctataaggtccgagttctcaagaagtttattgcaagaacaccagcaactcccaaatggttacatgcatgggaaccttgggttgcagacaatgccgaatggggcaaatgttttgggaggtgatgtagaatctagtagggataagttatcagcaaggggatttactccagaacttcataatgttcctatgaggcttgagatgggagaatctccggttaattatgatttctttggtggtcaacaacaatcaaacacacagctctctggcatgctccagcctttgccaaggcagcagatgacattcaatgatatgcaactactgaagcagcaagttatggttaagcaaatgcatgaatatcaaatgcaacaacaacttcaaaagcaacagctagaggccaggcagctcaattctttgaatagaaatgcagtcaatggaagttgcgcaagtgatacccaatcacgtatgattaatggcatccctcttcagaatgcgtctagtaactggtttcagccagatctcatgacaggaaatacaaactggatgcatcgcggcatctcaccagctgttcaaggttcatccagtgggctcatgattacccctgagcatgggcagtcgaacttaatggctcaacagtttggaccttccttgtacggtatgcctgttagtgggacaaatgcacctcaaaatgctttttcttccgttcagatgaacagattagctgcaccgcatggttctgcaaacaggagttactctctgaccaatcagccaacttcatttcttaaccaaggtgatgttcaggatagtcaaatgcaccctcgatccacataccaggagaaagcgttgttctcccagacatcagtgccagattcaaataataggcccaattttgaaaatttccagcaagatgattcccgtgagaggaacatttcagcgcaggataaattttgtcagatggaggattctggtccagcagaaaaatcatttatgaaagtgcctgaaaatatgaatgcattgcagaagtcgtcagcattagatcctactgaagaaaagattttgtttggttctgatgacaatttgtgggatgcatttggaagcagcactgatatgagcttgcaaggaaatcttatgtccagtaattctgacctattcgatgcatgcccctctttgcaaagtgggagttggagtgcccttatgcaatctgctgtagcagaaacaaccagcgatgacgccggtgtacatggatgggttaacagcaatactgtcccacatgcgaatttgcacactgatagtagagcccaggatttgggtgcaaaggcttcaaatccactaagtgagagattccacagtgattccactggggcagctgttcaacatttgcctgacaaggtaaataaagtttcagatcatggcctgtttgagaagcctatggctcaacttagtcaaatggctggtaatataattcattcttcaagtattgatgaacagaataatttgtgttctattcgacagaatgagggcattgaagatagatttggtatttggaaggctgcttccaatccaaatgtagctgctctgattgaacagaagaatcatttcacacaaaatccacaaagggcaagctatggatttggaatagccagtgcaggaaacgattctagtgcttctcgggatgtccagggcaatatccaacagcatttggataataactctgtggagaaggctatccctcaactgaaatcgagagacggcagtcagattcttgagtcatatgcgaggaataatgctggaacaaatgaaatggtaaatgcccgcgatttttctatgttgcctggtggaaaagagacacaatctggtcatgtcggtagtaggccctcgacaagtcgcaaatttcagtatcatcccatgggtaatattgatgtcactaatgaatcttgtcaagaaaaagtttctcatttgccaaccacattggagcaggttcctgtcggaaaccaagggtattttgggcaatcaaagtttcttggtcagtcggctatgaacatgccaattgacagggtaaatgtttccttagattttgaacatgtatttttaaaaatctgaatcccaatgaatattcttttggcttctccatggtagggacatgtctcacaaaacgacttgaattgcacaaatgaggcttttaatggcatgggttcagaaaactcacctagtacatctgcttcagctgacagaaatgttgataggtgtaatcaagtgaagagcgcttcgtcaaggtacttgttctttaatatgtgtgcttaaactattctctctttgaatgcgtttgtgaagttatttagctagtgtggccttttatagatttgtttttcaagtaactgacagagttaccaaactatgtaactattaaactatatgttctcatcacttttcatcgatatgtaattctgactgtggtcgttacgtagctcatattccctaattggttgcattcgtgctctccaatagcctttctgaatctttttcctgtgcagacaaactatgcttgagcttcttcacaaggtggaccagtcaccagataattcctcggaaacaaatgtttctgggattcctgaagcaaatgcctctgctgaatatggtggtcaatttcggcataatcagtcatctgcttctcaggggtttaatctacagttggcacctccatcccagctagctccctcacctgataacgtgcagttttctcggaattctttgcagccattgaattcatttcatactggccctgaaaaaggaggaacaagtcagtctaggtttgctccatgggcatctaatcaatcttatcagcaatccactcatcaaggaccatttcctggaatcttaggaggatccaacatgacctctggtttcccttattccagagggtatcaccaaaatcaacagatggctgttgctacccgacaatcagctgctaacaattcagtcgattcatcttctgagttgtctacccctcaagtgaaagaaagagatgaaagtagtgactttgatcaacgtatgctgtctgcttctcagcctctggtggcatccagctcgcctcagcagagttcctcttctggtatgatgtctgactcaccatccggtatttcagctccgcaacatcagttttggaaccagccatctaagcctcagccagttattttacgcccgcatccattgcccagcaacaacatggcagctagcttctcaaggcaggagaagacaaaccaattgtcctcccaaaatggtgacatgtcattaagtgggagggacatggtgaatatgcatgggttacagagtaaagatatgggtgcaaaacgaacatctaatgttgcttcaatgttctccaaaatggtgcagagcaatcatcaatcctttgatcgctctcttccttcaaacaacgttccaaaggatagcttacatcacgaggaacaaatggttggaagtggggagggcgatacatccaaggtgactgttgaaaatggtgattttgatcctcaagaggtagctcacaaaggggaacaacaatcaccttcaagatctgatggtttagttagaggtgggttaaataacaaggagtcagcgaatcacttgccgcatttaggccatactgtttctcagagtttctcctctaaaaatcatgcagcctcggttagagcagatcatcaacaaattagtcctcagatggctccatcctggtatagtcaatatggaactttcaagaatggactggtgcagcccatgaatgatacagggagatttacccccttgaaaataggagaacaatcgtctaatgttgagagttcggttgatggtacacatactgttcaatcatgcaagcagtgtcttatggagcaaatgtcgggctccgcaccaggagttgagactccctcatccgattcattgcttcatggtgctactgacaagcttctgaaggttgataaaccgaagaagcgcaaaactgccacatcagaacttcaatcttggaataaagaagtcatgcaggattcccaaaggctcaagacgctcaggtgtgtggcttatgcacactaatattcctaaaacaaatttcatatccgttaccgtattaaactttatatttttacagcgaggccgagattaactgggccagggaaactaatcgatttgctgaaaaagtgagtatcctcagtacatgttttctctatgctctttgtacaatgttgttgaatacgctgatggcttatgttctcacaggtggaatttgagactttacttgaggatagcccaccaattagatcaaagagaaggcttatacatacaacacaactcatgcaacaactatttagcccacctccggctagggtgatatctttggttgctagctcaaattatgatgttgttgcatatactgctggaagagctgcactaggagatgcatgtagctccagtagtaccgacaggagtgagggcttttcgcccccaaacaactcaaacccgtaaggatactttctgtttatctaagtgttggagcttttctagagtttgtggttctctattgacatgaagcgacccactcttgtgtaggttgtctgagagaacggaaaatgaaaaaatcagtgaccagtacatctccaaagctgctgaagatttcattagtagaacacggaaactggagactgactttgcagggtaaaaacctagctctctattataatcgattccagtttgaatggctactcatttgggctggttgatctcatgaacatctctggtcattcttgcaggctagaaaatggaactacaattccagacttgagagtcgaagtccaggatctagagaagtttgcagtgatcaatcgttttgcgaagttccacccgccatcttcatctatgaaccggaccgtgaattcacttaagttaaacctacaaagatatgttaccatagctccaatgcctcagaatattccagacagggtacaatgtctctctctctaactattcatggatccatataattcactttttggccaatcttccccattctttgctttcatatctatttccccaaatctttctatttttgggtgggtatgagttagttggtcggaatcctgagtatagtaaaggcctccgttgtcaaaaagcgggagatcctctactaaatatgtagcattactgtatgcatcatcagaaacattgtaagttaaatccatttgtatactttagtaaagaaatatcgctcagtacagtgccccagtaagaaatccagtaaacaagctaaaatatagcagtaagtggcaatttttgtttacacagctacggttctaaccacctctctctctctcaagtccttgagtacttttgtagaatcagttgtgctttgtataaaagtcactgaaacttaaccagaagctgaacttgtgaacacctttcgagatttagaaggtgactctaatttcttccccaaccaaagctaatatctcatccaccctgtaacaaatacgcaacaccaggttaatcagaatacactttgttcccagaattcgggaatgacgatggtgaaaatattttacctatgagtgtcgatgtttacttctgcaagccaagttgtcaagtaaatctgtggaacgagaagaattgaagttttacgatataatgctaacagacaattttacttgtgcggaatcaaaatccacatacctgcaaaatttctgcggttggctggttggtatgtgatatagaagaactaccgatattataatctttcactctggggagaactggcttagctacttccatagaatataaagaacatttggtgagatgatcaaattctccatggtaaagctcatctgaccaactgttgttgatgggttgaggaacttcagtgcttaaagagatcagttccattatgagcaatctctgttaatttccccgaaaaaaaagatcagaagctgatctagagtttaagatacatgcaggagttaggagtagacaatacctttagcattacttcgcgtttgaacatctccacaagctcctcagccatcttctctgggatcatttcaacatggcaagtaccaaactttagagacaacatggtaagtagttaataactattgaacattggttttatgggtctcttaccaaatgcagagacattccaaaaattaaacacaggaatgccaccgcaatctccagcatcatttgaatcttccttagtgccagagaactgtataagtgacccggtactcagcttcgtgtaacatctcagagatctgcttgcatttaccatctcaacaacaacagctacctgcatttttctacagttttgtttatagattccaaattacaccagaataaaatttctcaaattcacaagattttagcattgtcacacttaccatttccttgtacgaagataaaagcttgattcgataggaactctgaacataataagacttaatatgagaattaaaaacagagagaatgaatagaagacaaaaaatagatttgaaatgcaaattttcacctgttgcgtaaacagcttcttcaaagctttcttgtcgatatcaaacatgtcactcaacacaccaagctccatcattggcatatacctattgccatggaaacacaaaagcagtaagaatcaccagggacatcaaagtgaaacagagtaagttgcaaatacaaattaagaaaattccacacttttgtgacagatacgaattgactagcaaagtagcgtgagatcttcccgcagaacaagcgacgatccactgttgccgacaattcgacaggttagaccactggttcctaagattccgctgagcagctggtctccatagcctcatcgatgacgaaaaactccccggagatggagatgaagaagccagcgatcgcgaagaagacgccggagatggagaagcaggcggcggaaactgcgagatgctcatcgaatacaaaacgagttttttgagcttgagtcacactcctaaactctgttacgtcgccgggaattgaacggccggcgatagtttgttttctatttccacccagcttagggctttatgaagaaatacgaaaaggttacaattgtaattttcataaacttctgaacttgtttaaattaattttaattgtaattagcaattatgtctatataatagatcaatagaatctctaagaagaattacagtagatcagatatatatttaccaatcggagcttcagagagatccaaagagagagattgaggatgtctcacagtcacgggaacgcttcgtcggtgaacgatccacggcagccttcggcggcaaagccttacattccacggcctgtagcgccggaggatcttcccgttgactactccggattcatcgccgttatcctcggcgtctccggcgttatgttcagggtaaattttcatttctcctcttctgatcgttgctctgttagaaatcaattcagtcgtagaaactagtactccggttggtgacttagatcgtcggattttataagttgaactcaccgatttagcaacatcaatctctagctagttcgtgatgttttgagactggatctttccaatactcgctagtgattttgaatgttgaattgatttaaagcttacttccccaaataggcagattcatgactgtgtgattgcatcatattataagactagagaaaatgttagatcttgttgaaatttgagctcgagagattgagatagtcagtgtgaaagtggattaaaagatcatcatatgtggagtgagaaattcatcctctttatttatgtggcttgtgtatctctcagtacaagatatgctcgtggcttgcaattatattctgtgcacaatctctggccaacatgaggaacttggaaaatgatttaaagcagatctccatggctatgatgtatgttccttttcactcattctttcttcttatttttaagttaagagtgccaaaagcattgaatagtgaaatgaacctctctattcctgttaaaatccaacatggatcagatttaagctgattgtttctactcaataaattgttgactctgaatctggttttcttgtattaaaaacaggtttgctataatgggattggttacaaactacttagggcctaacagacccgcgacaaagaaataatcctcatgtcttaagagtagtatgcttttttttgataaaccttgtatggctcttgtttccgcaccagagattgctagtggtttgtctttgtgttttcgactctctaatccttgagtagcaaactagaaccttgagctcttgctcatttgtggagttcaaagacttttcagtccagatgcaaaaaatgtgaaatccgactttttctcttttgatctccctgatttttggaccctgcttcttacaacactgttacgcggactaacatcaaaaacactcctcaaaccaaacaaactcctcaatcattgtcactagttcgaatgtctctagtttcttgtttcaatcttttatatgaaactaatcaagaacaagagatttcatgttggcttatgtttttaacttccttatcaaatatttaaatcttctttgcggaataatacatatggaataatgatgtcgacttggcttccggaggtaaaatattgacactcattaaattagagaccttgtaatactctgaagcaaaggaagttaagtttcaatgactgattctaaacagcactcaacgacttgatagagagagttcttcagaatcttcgctgagtaaaaacaaaattagattcactggagttgttaccttgtggaatttctgttatggggcaaattctttactaagtatacaaatggatttgacatccaatattcgtgattaagcatacagtaatgctacatgtctactacgaaatctccggccttctgacgatggaggccttcactgttctcagaagtccgaccaactaactcttacccacccataaacacaaacattttcgggaggattggccaaaaagttaattatatggatctatcaatagttagaaagagagacattgtaccctatctggaatatgccgaggcactggagctacggtaacatatctctgtgggtttaacctaagtgaactcacggaccggtccatagatgaggacgattggtggaaacttgcaaaacgattgatcactgcaaacctctctagatcctggacttcgactctcaagtctgtaattgtagttcctttttctagtctgcaagaagaaccagattttcatgagatcaaactagcccaactgtgaaaccatttcaaactggaatcaaatacaagaagagagatctacagtttttaccctgcaaagtcagtctctagtttctttgttctactaatgaaatcttcagctgctttggagatgtattggtcactcattttttcagtttccgttctctcagacaacctacacaagagtggatccattcgagtcaatacgaaacctcgaagtctagacatttcccagtatttcagggataaacagaagatatccttacgggtttaaattgttctgaagcaaaaagccctcaatcctgtcagtagaagtggagctacatgcatctcctagcgcagctctagcagcagaatatgccacaaactcatagctagtaactaaagatttcaccctaccaggaaggggacgaaacagttgttgcatgagttgtgttgtatatataagccttctctttgatctgattggtgggccatcctcaagtaaagtcgcaaattccacctgtgagaacataaagccatcagcgtattcaacaacattgtacaaagagaccctgcaagaaaatgtgtaatgaggaaactcactttttcagcaaatcgattagttgctctggcccaatcaacctcggcctcactgtaaagaatacagaaaggttaaaatagtaatggatatgaaatcttttctaacaatagaactcataagccacacacccgagagtcttaagcctctggggacgttgcataacttctttactccaagataaaagttctgatgtgacgtttttgcgcttctttggtttataaacctttagaagttggtcagtagcaccacaaggcaatgaggcagatgagagagtctccactcctggtgtggagcctgatatttgctgcatatgaacaatgtaaccaggatccgcagtatttaattgctttgacgattgaacagaatgtaaaccatcatcagaattcccaaggttagaatatcgttctcctatcttcaagagagtgaatctccctgtatcattcacgggttgcaccagtccgttcttaaaagcctcatattgactaaacctggatggagctatttgaggactgatttgttgatgatctgatccagccgagactgcatgattcttgttgaagaaactctgagaaatagttgggccaaactgcagcatgcaattcgctgaatctttgtgattcaatccatccctaattaaaccatcagatcttgaaggtgattgtgtttctttcccaccaggcaacacagacaaatcacgggcattcacttgagtaagagactctggtgagaattttgatcgaaaactgtcacttgaattttcctttcctgagttccccatttcatttgattcagtcatgactttactaacgttattactcgcatatgactcaagaatctgactgctgtccccagaattcagttgatgaatagctttctccacagagttattatccaaatgatgttggatattttgctggatatccctcgaagctctagaatcatctcctgcaccatagcttgccctttgcatttgtagattttgagtaaaatgattcttccgttccatcagagcagctgagtttggattggaagcacccctccagttaccaagtctatcatcaatgtcctcattctttccaatagaacacgaattattctgcacatcaataccagaacttaaagattgaaacatatttccagccatttgactctgcggagtcattggcttctccaacaggccatgatctgaaacaatatttcctttgtcttgcaaatgttgaacagttgaacgggttgaatcagtatggccaccagaaacctgggccctattaccaatacgagaatctggatgtggggcattaatgttgttagcccatacagattgctgtttactaccccattcatgtacacctgcgtcatcactggctgtttctgctacagcagattgcataagagcactccaactcccactttgcaaagaggggcatgcatcaaaaaggtcagaactactggacataagatttcctgtcaagctcatatcagtactgtttccaaatgcctcccacaaattgtcatccgaaccaaacaaaatcttttcctctgttggatctaatgttgtcgacttctgcaatgtatttatattttcaggcactttcataaatgatttttcagatagaccagaaccatccatctgaccaaattcttcctgccctgaaatattctgctgaccagaattatcttgctgaaaactttcaaaattaggcctatcatttgaacctggaactgatatatgggagtacagattctcctggtatgtggatctagggagcatatgactgtcactttgattcagaaatgatgttggctgattagtgagagaggaactcatgtttgcagaaccatgctgtgcagctaacattttcatctgaaaggaagaaaaggcattttgaggagcatctgtcccaccaacaggcataccgtacaaggaagtttcaaattgttgtgccattaagtttgcatgtccatgctcaggggtaatcacgagcccactggatgaactttgaacaattggcgagatgccgcgatgcatccagtttgtatttcctgtcataagatctggttgcaaccaattattagacgcatcctgtagagggacaccactaatcgaaggatgtgattggttatcacttgagagacttccattgactgcgtttgaatgcaaagaattgagctgcctggcttctagctgttgcttttgaagttgttgttgaatttgatattcatgcatttgcttagccatagcgtgttgctttagtagttgcatatcattgaatgtcatctgctgccttggaaaaggttggatcatgccagggagctgattgtttaattgttgttgaccaccaaagaaatcatagttaaccggagattctcccatatcaaacctcataggagttttatgacggtctagagtgaatccactccctgataacctatccctactagattctacatccactcccacaaaacttccctcatttggagatgcctgcaacataaggtttccatgcatgtaaccagttgtggattgctggtgttctcgcaatacacttctggagtaatcggacctcattggctgctgggcaaaatttaaaccatgctgtgaatttgaagattgtcctctctcaggatcaactggaataagcaaaaaggctatgttcaaactcggaaaaccaaagcataatccagcatactaggctctaagctatgaatggaacataaatgatatatgtagagcataagttggggaagccccagtcacaaaggaaacaaaatgcataccggattgttgagtgctatacgtcttcagattggcaataagtgatgggtcaatctgcctctggttgctgactagaccatttctaaaaccggaccagcttccatctcctgcctgaggctgatggctgtcttgggataggccctcctgtccaaagaaattgtggatcctctctccatattcgtttccaggcatagattcagctccgataaattattataaatatctggacctcgagaagaaacagaaaagagttcaatattgtctctccttcgatcttatattcgaatgtaaaaaaaacaaaaaggaacatttttaacacctttttcccccgagaattcatgagctacttccaactaagatgctccgaaatccgaatgctcaagattttcctgttaaacaagcaaagcagatactgtacatttaaagttgaacacacaaagtgaaacaaaaacagtagatactattggttcacaagaaagctaaaacccctacgtctaagaaacactcagacaaagtctacgctccaatcagcttctgaaactatatcacactcaatatccacctgatctagtaaactcgagagctcatttgcagtaaatgaaatcaattaacaaaaaataccagctaaaattcccatttctccgcaataaaccagctgaaattaagctcatatattagaaatttacagaatttattggaaatctcgtgaacctacttgagatcaaaactgctgcaatacaatttcaccccaaatcgaagctctggttaaaatgaacattaccataacctagaattcaaccacacaggagaacgttccagactttaatcctaccgacaggctccaccaattggggaatttaaagaaaaaaaagatagggtttcaacaatgggaaagagagatgtgaacttacacttgtataacgtttggccgtaaaacaactggaaatttgcttctccgacctcaatttctaagaacaagttagggttttttctgaatccaagaattaacgaaatcaggggaagagagagataaagtgatcgaaactccaggttcgggtccgagaggttcgggtccacagcagatggctcgtagatccaaaactctctagtagagacggaggatttagatgagagttgttgtagtgtgggccagtgataagacaattataactaaacaaatacgacgccgtatcgatacgtttcaccatacgattaaattgcaataattcatgaatcattgttatttagatagtcagattaagatatggattcacattttttcaacgaattcatgttttgcatttcaatattatcttctttacataaactagggttgggcatatgcataatataatgcattacaaaagtcagatacgctttgttaaccgaaagtaggataccagaggtgatgatgtaatactatcaggccatcagggtttttgtactaaacaacttttctttactaaagtactgtttacagatgggtttaacttacaatgttatggtgatgcatacgataatgctacatatttagaggaaaatctccggcttttcaacaaatggaggccttcactgatctcagggttccgaccaactaactcgtgcccacccaaaaaaaaaatgaaagatttggggcaagagattatatgaaagcaatgaatggggaagattggccaaaaactgaattctatggggattcatcattggttagagcgagagacattgtaccctgtctggaatattctgaggcattggagctaccgtaacatatctttgtgggtttatcctaactgaattcaaggtcctgtccatagatggtgggtggaatttcgcaaaacgattgatcactgcaaacttctctagatcctggacttcgactctcaagtctggaattgtagttccattttctagcctgcaagaagaaccagagatgttcatgaatgaggtcaaaccagcacagatgagtggccatgccaaaatggaatcagttagctacggttaataccttgcaaagtcagtctctagtttccgtgttctactaatgaaatcttcagctgctttggagatgtattggtcactgattttttcagttttcgttctctcagacaacctacacaagagtgcgtctcttcgtgtcaatagagaaccacaaactctagaaaatctacaacacttcaaggataaactgaaaatatccttacgggtttgaaatgttggggggccaaaagccctcactcctgtcggtactactggagctacatgcatctcctagtgcacctcttgcggcagtatatgcaacaaactcataatttgagctagcaaccaaagatatcaccctagccggaggcgggctacatagttgttgcatgagttgtgttgtatatacaagccttctctttgatttaattggtgggctatcctcaagtaaagtctcaaattccacctgggagaacaaaagccatcaacgtattaacaagattgtacaaagagactcgtgagaaaacatgtaatgaggaaacttactttttcagcaaatcgattggttgctctggcccaatcaacttcggcctcactgaaaataatgtagaaagttaattacggtaaaggatattgaaagaaaaaaagggactattagtgctaatgccacatacccgagagtcttaagcctctggtgcccctgcatgacttctttattccaaggtataagttctgatgtggcggttttgcgcttctttggtttattaaccttcagaagttgttcggttgcaccatgaggcaatgactcagatgagggaatctctgctcctagtgtggagcctgacatttgctgcattttaaagtgctgtgacaattgaacagagtgtgtgccatcaactgaacttccaacattagacgattgttctcctatctttaagggggtgaatctcccagtatcattcacgggttgcaccagtccattcttaaaagtcccatattgactataccaggatggggccatctgaggactgatttgttgatgatctgctccaaccgaggctgaatgattcttagtcgagaaactctgagttacattttggccaaaatacggcatgtggttcactgattccctgtgattcaatccatctctaactaaactatcagattttgaaggtgactgttgctcccctttgggagctaccttttgaggatcaatagcactattctcaactctcttcacagtcatcttgggtgcatcgccctccccacttccagccatttgttcatcatgacgtaagctatcctttggaaagttgtttgaaggaagagagcgaccaaaggattgattattgctctgcaccattttggagaacattgaagcaacattagatgtttgttttgcacccatatctttactctgtaactcatgcatattcactatgtccctcccacttaatgacacgtctccattttgggaggataattgatttgtcttctcctgccttgagaagctaactgccatgttgttgccgggcgatggatgcggccgtaaaatatctgactgaggcaagggctggttccaaaaccgaagttgtggtgctgaaataccggctggtgggtcagacatcataccagaagaggaattctgctgaggcgagctggatgccaccagaggctgagaagcagacagcatacgaaatccttcagctgaatgtccacgttgatcaaagtcactactttcatctctttctttcactgcaggggtagacaactcagaagatgaattgactgaattaatagcagctgattgtcgggtaccaacagccatctgttgattttggtgataccctctggaataagggaaaccagaagtcatgttggatccccctaggattccaggaaatggtccttgatgagtggattgatgaaaagattgattagatccccacggagcaaacctggactgacttgttcctcctttttcagggccagtatgaaatgaattcaatggctgcaaagaattccgaaaaaactgcatgttatcaggtgagggagctagttgagatggaggtgccaactgtagattaaacccctgcgaagcagatgcctgattatgccggaattgaccaccatagtctgcaaaggcatttgcttcatggatcccagtaacatttgtttccgaggaattttccggcgacgggtccaccttgtgaagaagctcaagcctgcacaggaaatttctttcagaaagacaattgcaaagcacaaattacaaatattcgtagcaattaccacgagtgagaaattacatctcaatgagaaaatttgagttttaggtaactttgccagttgattacacctatcaacactaaataaattaagttacaaatgaacagtaccttgacgaagcactattcacttgattacacctatcaacactcctgtcggctgacgcagaagtactcggtgaattttctggacccatgcctttaaaagccttatttgtgcgatttaagtcattttgtgaaacatgtccctatcataatgaaagccaaaataatgttcagatggattcaaatttctaaaccacaatgaaaaccaaaggataaaatttaccttgtcagttagagtgttcatagcaggctgacctagagactgtgactgcccaaaacgagaaacttttcctcgacaaggttcatcagtgacatcaatattacccatggggtgatactgaaatttgcgaggtattgacggcctaacaccaacatgaccagattgtgtttctttcccaccaggtaacgtagacaaatcacgggtatttaccatttcatttgatccagcattattactcgaatatgactcaagaatctgactgccgtctctagaattcagatgagggatagccttctccaaagagttattatccaaatgcctagaatcgtttcctgcaccagcaatgccaaatccatagcttgtcctttgcattgaaggattttgttccttcagagcaactaaatttggatttgacgcagccttccagataccaagtctatcctcaacaccctcattctttctaatagaacacgaattgttctgcccatcgacaccagaacttgaagaatggaaaatattttcagccattagattgcgttgagccattgaattttccagcaggccattatctgcaacactatttcctctgtcttgcaaatgttgaacagctgtccgagtagaatcactgtggactctcccgcttagtgtatttgaagtctttgcacccaaatcctgggccatattaccacgatgaaaatttgcatgtgggccagtactgttattagcccattcatgtacgcctgcgtcatcactggatgtttctgctacagcagattgcataagagcactccaactcccactttgcaaagaggggcatccatcaaaaaggtcagaactactggacataaggtttcctgtcaagctcatatcagtgctgtttccaaatgcctcccacaaattgtcatccgaaccaaacaaaatcttttcctctgttggatctaatgctgttgacttctgcaatgcatttatattttcaggcgctttaataaatgattgttctgatggaccagaaccctccatctgaccaaatttcgcctggactgaaatgttcctttcacgggaatcatcttcctgtaaactttcaaaattgggcatactatttgaacttggaactgatgtctgggagaacaataatttctccgggtatgtggatctagggagcatatgactatcctgtacatcgccttgattcagaaatgaagtaggttgattagtgacagaggaagtcctgtttgcagaaccatgctgtgcagctaatctgttcatctggctggaagaaaaggcattgtgaggtgcatttgtcccactaacaggcataccgtacaaggaaggttcaaattgttgagccattaagttcgcctgcccatggtcaggggtaatcatgagcccactggatgaaccttgaacagctggcgagatgccgcgatgcatccagtttgtatttcctgtcatgagatctggctgcaaccagttactagacgcattctgaagagggatgccattaatcatatgtgattggttatcacttacgcaacttccattgactgcatttctattcaaagaattgagctgccttgcctctagccgttgcttttgaagttgttgttgcatttgatattcatgcatttgcttaaccataacttgctgcttcagtagttgcatatcattgaatgacacctgctgccttggcaaaggctggagcatgccagggagctgtgtgtttgattgttgttgaccaccaaagaaatcataattaactggagattctcccatttcaaacctcgtaggaattttatgaagatctggagtgaatcctctctctgacaacttatccctactcgactctacatccattcccaaaacatttgcctcattcggcatcgtctgcaacccaagattcccatgcatgtaaccatttgtgggttgctggggttcttgtaatacacttctggagtactccgacctcataggctgctgagtaaaatttaaaccatgctgtgaatttgaagattgccctctttcaggatcaactgaaataagcaaaaaaatctatgtttaaaaagcaagcaaccagcatactaagctctaactcttaagccatgaatgaaagatatatgtagcgcataagttgggaattccccgtcataaggagacaaaatccataccaggttgttgtgttctataactcttcagatcggcagtaagggatgggtctatctgcctctggttgccgactagaccattactaaaactggaccaacttccgtcaacaacctgagactgatgctggtcttgggataggccctcctgtccaaagaaattgtgggtcctctctccaaattcgtttccaggcatagattcagcttctagaaattatttttaaatatctggacctcgaaaagaaacgaaaaatatttcaatcttgtgtctcctttgatctaaaacaatcgttgttttctgcaaattaggaaacaaaagtgagtcaaatgaaaatcatcggacaagatcctcaaccctgattcagtttaagacaagaaagtttaaatcttcacgcaggaaaaccctcagaccaacgaagcgagacaacgccgaccaggtgataaggaaagctgaatcagcattgtttccttaaatgaaaaccgtacattgacatccaaggtccactaagccaaagcctaaactccaactcaacttctgaaactataacaaactcaaatgcacctaatccagtaatctcgagtattcatttgcagtaaatatcatcaagatccttatacaaaaaataaacagtggaactctcgcatttcacagctataaacactctatggcagctgaaaaataagctaatttcgaccaatttctagactttatcggaaatctcgagaacctactctgagatcaaaattgccgcaacacaatttcacccaaaatcgaagctctggctaacacgaacattaccataacctagaattcaacctcaaacgagaacctatcttacttcaattttaccaacacgctccaaagaattgggaattcacacatcattttcctattgggacattacacaaaactagggtttctactaagagtaagagagatgtatgcagacttacacttgttctgtcgcgtcgacaacaattggaaagcctgacaagctttcttctccgacctcaatttctaagaataagttagggttttcgaatccgataattaacgaaaccaggagaagagagaaagagagataagtgatcgaagggagtacgaaaattttcaacggcggacgcaggagcaaatccgaggctcgggtccggaagataaatttcaggctcgggtacgaaggagatgggtcgtagatcagaactctctttcaaagacagaaggttagactagttggttttggggcaagtgacggaccatttaattaactagggaaccacctaagatgttaaaacagcatcgtattgatgtgtttccacatgacaatcttttcattacattattaaaaaaggtagatccgatttttataatcttttcataagactttcctagtcaaattatagatactctttgactaactttaagtaagattatggcatcttttataacttactgccacattatcacatacttttgaattgttataagggaaatttgtctttcttggaaactaataaaccgaatattgttgctgataaactgtaaatttcaggtcaacactctcttatcatagtataatataaatactttttaatataaattagaatataactactttcatccaaaaaaaactgaaaagtagaatataattactttcatccgaaagattttgctttataagcctaattgcaaccgtttctgtttcttgggtttataacggtcctgctcggctgctcattcatcttccagcgtttgaagtatcaagtatggagagagtttcccttaaactttgtattcttttggtggtttacgcataatgagatatctcatattgttttcaacatcgtttgttcatgagtgacgagtcatgacattagttgcaacagtttttttatgaacgttttgtatattttctataagaaggtgaaatttatttacatgcaaaagtatccgacagtcacattttgatatcttagcactatgtttatttattttgagcgaaaagtatttttacaagatttgcttggttcgatttccatgatatagatttggaactttagtttaaccgacaattggttgttaatagtgcttgttttattcttctacatataaccatgttcgaggtctacaaaaggcatcgagaaacaacaattttcaattgtcaaatgagaataaggttcaggatcatagggtttcgtggttattacatagggtttatatgatagcttagacgtttcgtggatgatgatgacgatcaagcttcgtatataagtctccatgatatgagaaagaactcgtctgatattattaaaaatcttcgtaaatattcgattatgctaaaagaaatttcatatgaaccaactggtaactgtcggtcctaaaaaaaggctatctcgacgtacattttttggctccttggtaggtagttttgctcaaacaattgacatctttgtggtaaatcttgagcctcattagtttgtgttttgacttttgtggtagctttctttaacctgatattttgtcttcccctttgtacgtaatcaagttaattgaaatgaactgcagagttttgagaattacgaattcttgaatcattgaatgacgttgtttccgtgttgttcaatattgatagtcgttgtctatagcagtaaatccagaggtttgagtttctataaaactaaaatttatgtgatttgcctaaaacctgaaaccgaaccgaaaaagaaaaccaaactttaccttcttgttctggtttaacccatttacttacggtacctcgacaaatatggcaagtcattcttcttgtttttctctgacgtattagtttgattccacatcttcccacatgcaaattattttaatttttagagatacttttaatttgtaataggaattaatatattgacatgtcacatgatacatttattagtccatgaagatatttccatctcctagtatactgtcatcattggtcatctttacctaaccatcctattactcaactttcaaactcatctgcgagcctcctgcttacacgaagctgcaagcctgcaattcatatatattatccttgctattttgatattttcttaagacaatttaattacattaatatatatatgcatatttattgtttttgtcagctccttgagtacctttttgggggccctcttttcgttatggaaaacaaaacaaaaaagttgtttatgatatcaaatgcggtgtatagtccacaaacgtggcctacttacccaaatcccatccgtcgccatctcttgcttttcaatatataattacgattggaactgtgacaaatatgcggttctctcctttggcatatatgctgtgtttacatgcatttattttttacatgcatatttatcatataaatccgggatagatttcgaacgacattgagattaaccttcgagagttgttaatattcaaaagtttgatattcttttacatgcatgatgttgcttaaatctgatagttaataatacagggcccatagttgacagttatgtgctaggttgaataattgccagttggcagttgccactttatgtttatgtacgtgtacatcatgcagttcaaaaccttcgagaaaaataactgtgcgtaattaaaggacaaaactaataaagaacatacaaactataataagctaaaattctggaacaagtataaacttaccaaaattgtattctactgaccataacatatcatccaacattatcaaccacatatcttacctaccattctcgagtttactagctaccacgattaacgaaaatatatggcccagattttccgaatgatcagctagtactacttgtcatttgtcaagtatagctgagtttctaaatggtgatttgtattataaaggattataattaattatataataattaaattactaatttagttgaagctgtaaagctcgcctaggttgtattgtaagtatccgatccttacgaaatttgcttaaactagattacactatattacataacggtacaagattcaaaaattattactttcaccaaacaatgtgcttgttggttggagtgaatttttgtgattaaaaagtttataatttctttgttgaaaaatcttatcataagattatttatgtttacgcttgtgaaatcatggaatttataccccttaattatttatatgcgtgttgacaaaataattggagtgtaaattttaatgattatctacgtacagtattattacaacaaaaaagcatatgtgattttggattaatcatgttatgtatatgtatgtatcttcacatatataatattataacttataagttttatttatttatttattacaacttataagatgttctaccttatgttagtgacttggcttaaccggaaaatgttcatactcaactcacgttctctagaagatagcgctacctttcacagcttatcattcaaatcttacgaacccaaaatctcacttaccagtcgactctctccctttcgcttgctactttttctacataaataaatgcaatgataaatttgtgcacacattcgtatgtttgaaacatggtaggatccacaatttatactttatagactcaaaatggaaaagaaacgtacattataaatttatctgcaatttgttttctcttgctaaactagactgtataataacctctgtatatgctattactcgattgtaaacgtaccccgcaagtcgcaagcaaggtaaataaagtataattatattttcacacacgaaactttaattattatttttatcacttgcagattaacagtaaaaaaaaaaaaaaattgtgactttaacggcgacaaaaactactgatctttctccaatatttaaataatataattaataaacgtcttttcatacttgtattttccgacccgagttctgaaagtgaaaacatatggtactagatattctcgatttgttttgtagccactagactctaaacagaaaaaagaagccaaaaggacaacgttaaaaaagagacactgttattaaaagttagaaaccaaacggtgaaaatccagctacatacataaaataaagccaaggtaccaaactaatgaactgtaacctcttttttcttttcttttttgttaaaggatttatgaactgtaacttagaatgcttggtttgtgggcagtgtaatatatgacacacatgcattttttttgtttgtcaaataggaagacttcttttttctttatcaacttccttattttcataaaacaaaacactgaaaaaagtacagatgttctcacgtacgtcacgtgtacatacatatatattagaccactatataataagatatgaagtgttaggtttaaatcaattaacgaatcccatccaaatgatgaaacagttaacaagaaatcaaaatagtttattagggttacaatgattttatacttttaagaaatcttagaacctatcacttacaaatgagtaaatgaccattactcctcgagaatctaaggcgcttaaggaagcattgcgaatcgggtgtgaaaaagatctatttttgaattatttcacacaatttcttaatgtcaattttcgatgctcccatattctccacggtttaaagcaagattggtgggaaagggatattctcgcatcgattacaatgaaatatgggttgaaaaaaaataaaaaaattactcaatgttgcaccaaaaaccagaaaactctaagttgcgctaataaaaaaaaaagttataaacccaacatcaaaccaaaaccgtactaaactgtcccatatgagatttagctttaaataaattagtacttctcataacgataactaaattaaatttccctagccaagacatacatatagttttgattgacaaaaaaaaaaaaactcctctatttatagcttgtgttttgtttcctcatttttcacttaccattcaaacccaacactatggcaactctatttctcacaatcctcctagccactgtcctcttcctcatcctccgtatcttctctcaccgtcgcaaccgcagccacaacaaccgtcttccaccggggccaaacccatggcccatcatcggaaacctccctcacatgggcactaagcctcatcgaaccctttccgccatggttactacttacggccctatcctccacctccgactagggttcgtagacgtcgtggtcgccgcttctaaatccgtggccgagcagttcttgaaaatacacgacgccaatttcgctagccgaccaccaaactcaggagctaaacacatggcatataactatcaagatcttgtctttgcaccttacggacaccgatggagactgttgagaaagattagttctgttcatctattttcagctaaagctctcgaagatttcaaacatgttcgacaggtaaaacaattataaacggtattctcattttctaacgctatagctcactggcctgtaatcatgtcatttcaatgttttgactttttctttatatatacataattataatttataattgggatttcaaaccctatctctcactatttcaagactagaccggattggaatttgaacttttgtaatgaatattagtatctgcacataaattttatgttaaagttgggttttcttaaagtgaatttatatattaaaaatatataaacgattgggttttactcaaatgaatttacataagagctaggtataagtgcaaatatgcaatactgtcattgtcgtggatgtataaaagtatgatctaactttgatgatgccatggaaaaattggaaagttcagatccagaggaaatattgcttgaattataaaatgtatggaccacattgtttccttaaatggaaggtctcacgagtttctcaatttcagactactgataatatatgctattatagattttattttctaattattttttttggtttaatttaattagagtaaatttttaaaaagaaatatatggttttgttaaccgtgttttaaaatttgatagagcttttagatcataatcataattttttcgtattaattgtgattatgttggacgaaaatacttaattagtattcaagaaaacttttattctaaaaacagaataaaataaattttacaggaagaggttggaacgctaacgcgggagctagtgcgtgttggcacgaaacccgtgaatttaggccagttggtgaacatgtgtgtagtcaacgctctaggacgagagatgatcggacggcgattgttcggcgccgacgccgatcataaagctgacgagtttcgatcaatggtgacggaaatgatggctctcgccggagtattcaacatcggagacttcgtgccgtcacttgattggttagatttacaaggcgtcgctggtaaaatgaaacggcttcacaagagattcgacgcttttctatcgtcgattttgaaagagcacgaaatgaacggtcaagatcaaaagcatacagatatgcttagcactttaatctcccttaaaggaactgatcttgacggtgacggaggaagcttaacggatactgagattaaagccttgctattggtcagttttttgacaattaatttccttaaaaatcgtatataatgaaagttagattgttttttttggttgtaaatacagaacatgttcacagctggaactgacacgtcagcaagtacggtggactgggctatagctgaacttatccgtcacccggatataatggttaaagcccaagaagaacttgatattgttgtgggccgtgacaggcctgttaatgaatcagacatcgctcagcttccttaccttcaggtaccgttaacccaaaccggaatttggaattgttttggttagcgagctattgttgttaatccggttttggtttaaaacaggcggttatcaaagagaatttcaggcttcatccaccaacaccactctcgttaccacacatcgcgtcagagagctgtgagatcaacggctaccatatcccgaaaggatcgactctattgacgaacatatgggccatagcccgtgacccggatcaatggtccgacccgttagcatttaaacccgagagattcttacccggtggtgaaaaatccggcgttgatgtgaaaggaagcgatttcgagctaataccgttcggagctgggaggagaatctgtgccggtttaagtttagggttacgtacgattcagtttcttacggcgacgttggttcaaggatttgattgggaattagctggaggagttacgccggagaagctgaatatggaggagagttatgggcttacactgcaaagagcggttcctttggtggtacatcctaagccaaggttggctccgaacgtttatggactcgggtcgggttaaaatttaactttgcttcttggacaaggtatatggcttgcacgaaaataaagttttaaaacagcgtagtttgatccggagttagctttatgtaagaacgtgtaacgccaaatcaagtcattattaaatattgtgagttgtttgtaacctatatataaatcttgaagaggaagatttcagaaatcttgaatatgttttaggaaaaacattgttttttttacagtagcgcaagttgaattaaaacctattccttacagaaccaaatgcattaataattctagatatttttggccaagacaatcagatttttcaatatttcatatatactaggtggaacaccaccacctgcaactctgcaacacatgttacgttacacaatcacttttggcggttttcaattatttatataaaattgtaaatgtttgtacacagtagaaaattagtaatagtgaattttgtttctccgaatatgtatagcaatatatatggcatggatcaaactagccgacatcctaacttgttcacagctttcctttttacttatctagtcgattaagcatcagaaagtatgttttaatttttaaatttgaaaaaggtgtacttacaagttcgggtgttcacacggaggagagctacaataatgaaaaagctgactcaagaagggctatagaagaaacaagagtcacggaacaagttgtcactctcaatctccagtacactagcttccataactctctctctttcttctctctctaaaagttatcagaatagaaatctctctctctcaacaagtctaacagtgccatttgtatctctgaactccaaccatggctcctctggttctctaccttctcactctcctcatggctggccataccagtaagaactctcactgatcttcttcacctttgtttatggatttggtctctcagtctcactctcgcttaccctttcacattcagctctggctctctggtttaagaaacccttaatctacaaagcttgctttcctcgcaaatgaactaccttacttatctcttatgcaactcttgttgatgatttgcaaacatcttaacctctcgaaacaagatttacaaatcttactggcttcacttacaattttgttcccatttttttcttctttggtaggtgcctcatggtgtgtgtgcaaaacagggctgagtgactcagtgctacaaaagacattagactatgcttgtggaaatggagctgactgtaacccaactcacccaaaaggctcttgcttcaatcctgacaatgttagggctcattgcaactatgcagtcaatagcttcttccaaaagaaaggtcaagcttctgagtcttgtaacttcactggtactgccactcttaccaccaccgatcccagtaagttttcagaaagttgatactcttgtgatctttagaaccctacaaaattttgagtctcagaaagttcaagttcaaggtcttttgattagagtactaaagattcaagtagattcaagtagagatattttttctctgatgtgtgattttttggcacaggctatacaggatgtgcattcccttctagtgctaggtacggctctttgcttctctacacatttattttcttaatggctttatctagaaatttgaaggataccatttatttttttttggacaaagaaggatagccatttaatactacacttcaatgttggattaactaacttattatgcctatttaatggtctaaactttagataacatctacaacaattcaattatgcctttttttggggattgtataaagtttgaacctatggttagtgtattgacttgcgcgtctctttgcaacggttttatcttgttgctgtaagctattctttgaaaacacattaatgataaataaattgaaaagtatagagatggcaattgtttcaaaagctaatctttctgtttgataatactttacatgaaaaacaaaaaattaagaatagtttcaaacaatacaacttgtttaccttgtcctaacaaattcaactcaaatgacatgtgtttgctttaaaatagtaacaactgtaaattcatttgctcttgaaacataagtgcaagctaaagataaacgcaaacaatacaattaggcctaattaagattacgaatattgttgtttgtttatagtggttctagtggaagcggtagcaccaccgtgacgccaggcaaaaacagtccaaaaggaagcaacagcatcaccacatttcccggcggaaacagtccatactctggcacaccatccaccggcttattaggaggcaatatcactgatgctactggaaccgggttgaacccggattactcaaccgaaagcagtggatttgcgctctattactccaacaaccttctgttaaccggcttttgttctctcgtgatgatgctctgaactgaagaagaatcactgtcttcttttagtttatgcttagtcaaaaaatatgttatttatatgttcttgttgttttagagataatttaatctggatttcggttcttttttactttccggttttaagaaaacacttatcaatgtaaaaccaaatctactatcgatcggtttggtacgaattgtttatcttttgactaagatttttcttctttttggttcggattgggtctaagaaatttcgaaccaactaaaccacaataagatttactggtctagaaaattcattttagttaaccggattgatacgaataaaagcatctcggtttggttttagtgtggttttatttgggaaacactctgaatgaatgagagtgtcccctcggtaaaatagaaataaagtaaatgcttacctataaggggttggacttggaagaaaactgtattcttctacttcaagaacacaatctcttcttctctttctcttgtttcgatttccataccatatatatttgacaaatccatcgacttaatttgaagacagaaaacgatggagaatccaaccgtaagatcattacagagacttgggtttaatccaatctgaagacatgtgtttgcaaataaaaatatccattttctttatgtttcttggctttctttggtttgaatctttgagattttgaattgtaaattttctcgattggtgaaaaagtttttgatctgatgagtttctacaatcaatcttgattatcctctaatttatttatttctggaaaccaattgttttttaagaagattttgcaactatttgattggttcagtaaagaaaacttgagaattttgttgttaaacgattatttcatgagatgatctcaaatattatagggattatttgattaaactcatcatcttatgatgattttcttgaaaacccctcagattcagaaaaattgttaggcatgatcctcatgctttcattgctttcgttataaaaacccaactgtttggcgttgatgattccatgctgaattcacatttgcgattgattaaaacttgtatacgtttttgctgattttactcgattttctgttacacagggaccttgtcaggtatgtggggatatcggctataaggatttgataatgacttgtttcaactgcagagaagttagagaacatatgtatgatgactttcctgccctatatcttttgtagaatactctttttttacatgattatgattatcattcttttcaataaatctttctcttttgtgtatacagttattgcgcagcagtcttgttacgatctgtacccggtatatggttatgtcaagagtgcagaacctcgactcgcgtgttacagatatcgcatcatgtgaacaactcaactaatagcggtaagaaagaaacttctatgccggttcaaaatggtggcttgagacttcatcagcctcctcatgtacccatgttgctagcacaatcatctactaataaaggtgatcatataaagtttatgtttatgtttatttaagtatagtgtgtttaggattatggatgatcgtttatataatgcttatttactgaactaatctacatgaggtgtctttttcatagcttctttggtgcccaatgatacatctccaatcaagaaacaccgaccaccttttttggcttttccttctccaaaaagaaaacgtaggacgcttcggcttgcaggtgaaaaccacaagttgttatttgattcaatttctgctagaaaatgagattatgatattgtgcttgtgtattaatgtcattttctttggtttctgttttagaaggacataccgaagaaactaaacgtcaaagctcacatccttaagtgtttcgtcaaattgattaagacatgtgtgttaacttctcctgagcctctctttgctttaagttgcttaagtgagtgcatctgtaattaagatttttagggtttcatcttccttggatctcaagttacttacaagctatgtgagattggacttactgacatgtgacttgctcactttgacattccttctttcttacagtgtatcctgtatatgactcattgttatgatatccatcatatatctttgtttaacgcagaaaatttgtatttagtttagcatttttattggtgagctcccatatgatgtgtagaacctgctaatttgctaaagaaaatgatgatttgatttgttacgaattagacaatcaatacatgttcccagcatttgaattttgccggatttaaaaatgtttttctacttagaaatgatgtaatctaattctaaattttaaattatcccgcgatttttagatgaccgttagaatttggcattttcatatttggttatagaaacgagacacgtcaaatttcaatttaaaattttaaaatttacgggatagaaaaatattttttttattattttaaataatgaaatataattataaactatcccacgatttttaagatgaccgttaaaatttaggattttcataattgattatcaacacaagacacctcaaattttgattctaaacttttgatttaatttattcaattctaaaaattaaataacttctcatgatgacaaacaacattaaaatactatataattgtgactttacggtaatttctagtgataattgattatgtaatggcaattaagacttttatgaaacaaatatacactacttccatatttaatttgaaattttcttttgaaaatttctctccgtttattttttgaaaagttcactccttatgtagtttttatgagctttatttaacatttttgattttatttatcaagtactaccatttttattaaacttcgtgatatttaacttcaagttgcttagattgtcttgtttcattttcaaaaatcttaaactattccataaaatcctacataatttaaattttgattattttaattttatgaaataaaaatttaatgtacattaatgtatatcatagtgagagctatctatgacatttgtcaacaagttaattacttttctttatgacatttgtcattatatttttggtttgtgcaaagacatttattgtttaattgatttaatactaaatcggcattgtaataaaatgacacataccgtcaaacaacatttaacattgtatgaaagcaactatgattcgcgttgtgctgattttttttttactacatcttattctcgtcaaaaactatttatgatacaataattaatgaatatgctactataggtttgttatcttattttcattctttcacaaagtttacaaccaattgtagatgtaaaaatgtatgagagctaatagactatttatgtttaaacaaagcctagaaattgagggtaaagttgtttgtatttcttatggagttatggtagattagtaaaagaagattagtacatgaatggtgaatctaaaacttaattgttttaaaataaatgagttaatatacgaataaagttaatttagtagatataaaaaatatgcaaataatcaagaaaatatcaatagaagtctagtagttagttttttttttttaccaaacaagctgtaaataaagcacaaagtaattttgaagatgtgtaaaatccgagttatttgataaatccgattgaaaaacaacacttttctcttggtaaaagaaactataccgaaccgaattgagactttatatggtttacgtttttcgaaaaccgatcaatcagaaaccaaataaaccgatataaaccggatgtttttgatagtcttcgacagtgacccttagcgaattgttttttttttattggttggaaaatagaaattccggtaacctttggtagctcgtacggcttcttcacaaaattgccggcctatgaagatcatttccttcatttaaccctccaagctccagattatccattgctgtactcacaaagctccaaagtcttgttcttttcttctttgtttctttaattactgctcatgactatctctctgatggaaaaagtcgaagcctttttctgtgtttctctaacgggtattgattgctaagtacttcgatttccgcgtagtatggtacatagttgaagtttgagaatttgggttttgttctctgatattttaactttggtgggtagcttttatatgcttattatagcttctttcttcgaaattgaaagcttgagcctttgattctaaagcttggagtgagttcgtttggattgatgcagatgttgtcaatgagggttagtgtttatgtagttggattggagaggatccaattactcttttgattgttgaggacgaagagagaagaaatggatctatggttaatcgcagctactgctgctacaggatatataaccaagcatttgcgaaatgtatccaaaggtaaatcttcttctgaagatttgactaatgtgaagctagagtcaccgagatgcttggctagtaatgtagtaagagttaaaaaaccaaaagaagaaaactttgaggattgcttaaatggggaaactcttgatctatatgaatgtggcaatgcatatggagtggaagtagcttcgaataatgaggaggatttgggatatgatgatgagattcgttcaggttcttttgggaacagagcgtttcttaggagaaatcagtgtcctatcaagcctttttctttggagaaaagcattatgtctcggttacatagagagaaaatatccatggaggaatatatgcgtagtccgtttccatcaccttgtggttcagtttcgaggcccttgcttgttactgatggtacaaatgtaattagcaagaatactggagattctgttagccagcaagtttcggaatgcgggattcctcagcttaggaagttgaaatcttcacttctttacgctaaaaggggagttggagatgcgaagagcgtgagtagaagatctgataatgggactggtaaaattcttgctctctttttaaaatgttacatttgtttatattgacaaaggagaagacttaacatgttatctttcttttcaggatcaaatgatccagtgttagtgctatgcgttgggatttcaattgggataatgtcatcatttgtagctaaccaaaccgaactaaacaaagtcagagcagagtcaaagcagacagagaatttgggaaaagagttagaagatgacatacacgatggtgaaaaacagtgtgatgaaaagacagcagagaattcagaatctataagtaaaattgaagcagaacttgaagctgaacttgaaaggctggagatcaacatgatttcctccaacattgagacaaaactctcagatgtctttgaggtgagctttatactctagcttttgctttttcctttcctttcactgaatcattgtctcattttggtcgatcatgtctgttcattctggaagttatcccgcagcactaatgatcctgttttctccatatatgaaaattgagcaaaacagatatttgatcataagactagccattgtttaatcatctatagaagttcagcttgtaaattgtttctcaattctgcagctggagccagatttcgaagtagaatttgcgcagggtgagctgagagatgatcaggttgaaagacagcgttttgatgaaaccgtgtccaaccaggaacggagtagcaattccacacctgaatcaggaaactacatagtctcacctcgtgagttaagcttgcgtctgcttggagttatcaattcatgctatgaaaaacggataaaagaacttgagaatgccttacaagagagtcagaggaaagtggagcagctggtcatagaatcagaggaaaagaagaaaccattgtcaaggatttgggaaacccatgaagagatgaaatataagaggggctcaaatcctccagtttctgtagctcatatagagaagaaacataatcctgcagagatccaacctctggttatgactttagaaggggaagcacttgacgcattcaatgaatcttacgaggaactgatggatattaacgactattcagaagaagacgatttacaatgtgtgatgcaggagaatgagcggcaagaagaattgtctttgacgagcaaaagctcaccttggagccataaagattacataaaggattcttcaagaacttcagaggatgtgaatttgtccatgctgcaagatctacttggtctgagcgacgaagaagaagaagaagaagatgagatggagaagcatctgataaagcagattgttgagaaaacaaagcaagggtcttctgctgtgttaaatgcccagaaaatgctattcctcatggaagaaatacaaccaaatctataaaaagcatttactcaaattctcatcattttttgatgaaagtattacacgtctctagttagtgtgtgtgtagatatgcaaagattggtgtaacttatcttgtcatatgcaaagaaactgaagagagaagaagatgtgttgtcaaattcaatgtatatatcttaagaccagtgtcaaagcttaagatgtgataatctttaagaccatctccaaaactccgatggagatgctctaagtttttctggcagaaagaagagtcttttgaaacctgctggttgggtcagagagtttgagagaaggcgccaaataaaccaaaagctagacaagaagaagcggtgaagttttgaaaacgagaataaaattcggcgggaataattaacgaaaaatctaatagctcccgcgcaaatctttcttttacaaaacaaaaccattttgcttcccatttcctgtgaattctaaagagaaagaagagatagagctagagattaagatagagatggagaactcagtgacccaagatggtatcgcgacagtattagccaatcaatcccttgattcctcctctgttagacccgaaattgttgttcaagtcgtggatcttaagcctgctggaaatcgatatacgtaagtttcgatcttgattttgtgtgcatcgatctgggttcttctgatatgtttagaaccaaacttgttatagaatagggtttgagatctgggtattgttagaattttgccaagtctcagtttttttttttttttttttttttgggatctagtttcaggtctgtgttagctttaatcaaattcaatattaactggtcgatgaagtatcttgacatgtgatttgggttctcaggtttagtgccaatgatggaaagatgaagattaaagcaatgttaccagcgactttgacttctgatatcatctctggaaagattcagaatctgggtcttattcgtctccttgagtataccgtcaatgatattccaggcaaatcagaagaaaagtaataataataacaatctcttatgcatctttcatgattaatgattttcaagcaaacagaaactaacctttgttttctttatttgccacttcagatatatgcttataacaaaatgtgaggctgttgcttctgcacttgactcagagattaaggcggagattaaagcttccacaggcataatgttgaaacccaagcatgagtttgttgccaaatcagcttcacagattatcaatgagcaaaggggaaagtaagtatatctttttttaacttctgtttgtttcatagtctctgtcgaagttgttgtaaatgttgcttaaacaagtctctgtggtttttgtagtgctgcacctgctgcaagaatggctatgaccagaagggttcatcctcttgtgtccttgaacccttatcaaggaagttggactattaaagttcgtgtcactaacaaaggagtcatgagaacttacaaaaatgccagaggagaaggatgtgtgtttaatgtggaactaactgatgaggaagtaagactaatctgatgatttttctatggttctggattattgtcttagactttatgtggttattgatttttatttacttatggaaatccagggaacacagattcaggcaacaatgtttaacgcagctgcaaggaagttttatgacagattcgagatgggaaaggtgtactatatatccaggggatcacttaagcttgctaataagcagttcaagacggttcagaacgattatgagatgaccctaaatgagaattctgaggttgaagaagctagtaatgaagaaatgtttacccctgaaactaaattcaactttgtacccattgatgagttgggtacatacgtgaatcagaaagaccttattggtaagagctgttatctatattgaactctttttgtttgtaaacattggtttatgatgaaacttagttagtgactttaatgtttctcatttccagatgttatcggtgttgttcaaagtgtttctcctaccatgagcattagaaggaagaacgacaatgagatgatcccaaagagagatataactttggctgatgagacaaagaaaactgttgtggtgtccctttggaatgatctagcaactggcattggccaagaactgctggacatggctgataatcaccctgttatcgcgattaaatctcttaaagttggagcttttcaaggtaaatctatacttttcattttagtgttaatgctatatatgcattatgttaaaccgggcgctgatgcaaacctggatttctaggtgtttcattgtctactatcagcagaagcaatgtggtgataaaccctaattctccagaagctacaaagttgaaatcttggtatgatgctgaagggaaagagacatctatgtctgctattggttctgggatgagttcttctgccaacaacggatcaagatccatgtattctgacagagtttttctttctcacatcacaagcaatccctctttaggcgaggagaaggtacttcaaaacacttttaacatattaagatatggaaaaaagaaaagttgatttatgagtctcgtatatatattgcagcctgtattcttcagcactagagcttacataagcttcatcaagccagaccaaacaatgtggtaccgtgcttgcaagacctgtaacaagaaagttactgaagcaatggactctggttattggtgtgaaagttgtcagaaaaaggaccaagaatgcagtttaaggtatgatgatagtgagattcgtaaatattcaactcaagaaaagattttggttctggtttgttgtgttcttctttaatcatgtgtacttattgtgtgatcaggtatataatggcggtgaaagtctccgactcaactggtgaaacttggttatctgcattcaatgatgaagcagagaagattatcggctgcacagctgatgatctcaatgatctaaaatcagaggtaagaaaactcaaaacatatatatcaactggaacacagtccttattctccatgttctgatttaagatacgatgttatgttggttttctccaggaaggtgaagtgaatgagtttcagacaaaactgaaagaagctacttggtcatctcatctcttccggattagtgtttctcagcaagagtataacagtgagaagagacagaggataactgtaagaggtgtttctccaattgactttgctgctgaaacaagattattgctccaagacatttccaagaacaagacatctcagtaattctaacttttagcatgttttgtctggttttgtcaaagagtcccaaagttgtgagtttttctgcagtcggttatagtagttcatgtcattagagaattgacttttaaatctttgtaagtgttccaacaatcaattcagagagccatttggaaaaagtagaagcaatatattatgaaatcgaagaaaatggaaacatccatgggtttgtaaaaaaaaatcctaagagaacataaactagcataagaaagaaaagaacaaattcaattggagaatcactgttgctgaggcaaaggagacttcaattcctggtaattgtgtagacttccagtgaaatcagtgaacaaaccatcaacaccgatcttattgagccaataatcatactctaggtaagggtcctgattaaactctaaatgcagaaactggttctcattacggtatgtgtatggatggacctagcaaaaacattattcaacgtgaagtttaatgaaacaaatcagtgatgatagtaagagagtggagacaggagttcaagtcctacacacaaacctgaagattacgcgaatgtgctctcgcaactaaatctgttggtgtcatgagacggttattgttcacaggaacaattgtgtctttccatggaccaatcccaattacatatggtttaatgtaatccaaatatgcgtctgatgtgatctctgcgtaagtctgcattcacattcattaccttatgtataagcaattttgacataatgagaaaggaagaaagtgaatatgtaaataccttattagtgtcttcggtaagaatagtgacatcgtcgatcaaaaacaattttggtgagtctgtcatgtttgaaatgtaaactagcgaagttgctgcaaaagactgaataaatattggctgttttaaccaatcttcagacagatatgagcctttgtatccatatttcttcaaagtttccacaaatttatcttcaaattttttaccatccgcccacttcacctgcacaagtttccaaatacaatttaacatcctctccatttgttatcatcaatgactaaaagttgaagctaagatttgatggtttgcttacttgctgattcatgaaaaccggattcttgatctctggatatatcccaaccactctaggtgcatccagtgctatcgaaatatactcgtcgaaggtaataatcgggaatttaccattgtattgttgatccctgaaaggatacctctgctttgcaccaagtgttttcagctctttgagagtaaaatcaactgttcttggaatgttcaatctcatcgtcaaaatttgaaaaaaatgaaactatatcaaaacaaatgataatggaatgtttttagttaccagtgaagaagccggtcatgttcattccttggacttcataagtcctcttacggtctgcaaactccttatggtctgcaacatcggttgtatcatcgagattaacatcgtggtgacatataagaacaccgtctttggaagacaaaatatcggtttctataaaatctgcaccctcctctatggccctctgcaatcaaaaaaaccttgtgaaaccagacaaaattagtgtaaaggtaagagacttttgtatagatccaataccatatatgcaggagcagtttcttcagggagctctccgtttgatcctctgtgtgcaaggttgtaaggacgggaagtctgaagtggtttcttggttgcatgttttgcttcgcttgggagacgatacaaaggccttgaggcacaattagcaaccaacaatgacagtaaaagcaatggtagaagatctgcaaaaattataacaaaaattgctttaaacgaagaatcaacttagacatagaaacaatggagatttgacacttacacttgaaggccatgactgaatttgagctagaaaaattcctccaacgaccacactgcatgaatccaacattatatagatagacctgcaacttatctttagaagatttagccaaaaaatcgtaacaacccaatcagcattaagaatattcctctgagaaatctagtatgccaatagaagataaactccgtgttgtttgaaagtatattcttcttctattcactaggttttagttttacattttaaatgatcgcagatatcataaggcagtgtagttttagaacgaagtgaagttgcagatccagattgtattgctatgttctagtcttttgatcctttgttaattacaaaatgtacttgcttgtcgatcatgacaagccaagtttgtaaaacaatctctggttgaatgaaattgtcgatgataaaatgcaatcacgaagcggttgtgaatggaaaattaactcttttatagcatcccaagacacaaatcagaaacgagttcacaccaattctagagaagaaaatacaagagtttgagagagtgaaaactaaagagaggctcctccattcttctcaaactcccatgatcctccattcttcttctcaaactcccatgagatccccatagctacgcatgaggacgactcctcctgcaaacataccaagtgctcgcagaagtttctgcaaccaaaaggaattcgtatgagacagatttcgatccaaatacttcaaaggcatgaactataataaaccctaaatctctaagagacccaacatccccaaattcccattcgaacatccaaatacttcaaaggcatgaacttaacttgtgattgataaaccctaaacctctaagagacccaacattcccattcgaacacacaatttcataagaagaagacacagagataagataaggtcatctgatttggcctatcgaagcataggagagaaaatcaatcctacgttaaattctgaaacccaaaacgaactcattaaattcaattcccattcgaacacacaatttcataagaaagacaaaagaatcacattgtacgctcaattgaatcaatttgtaaatcctaaaccgtaattcaaaatcgctgtacaactcattaaattcagccgaaagcccagaatctaatcatgaaacatacaagagaatcgagacttcgatattcaatagacaatcaagtcggaattaaacgaaagagagaatgtatgaaggttaccatgttcaccgcccatttttgttcatcatgaacctcggagtgccagagtgctttcatcttttcgatagagacaacgttgttcaccatcttgctgctgaaaaatcgaaacttttgatcgtcgaaaaaagaagaagctagggcttttaaaacgacgaattgggatcgggaaattttagtcggttaacttattaagggtttacgttttgtttaattaccaaactaacctttactaatatactaataaccggtaaaaagtgatgtgatttggattgatttcaaccggagaagagttaaccactcgccgaacgacacgtgttcaacacaatcctattcctcctagcaatctcaaagcttgtgtgatctacaagctcttggtttctccattgaagaaaaagctttgacaaaaccagggaaagagacagagagagataatggcggctaaactaatctgttcgtctttaacagtgcattcaatggcaaataagaagccatcaccttctgctgcaacaagaacaataacctcaaagaaggtaaaagttgaaaatcaaaatttatcttcttatatgtcccaaaatctaatctctttgttatgtttggcagagcacagcgactccacaggtgaaactgctgacaagagtcgagcagctcaagcttctgaccaaagccgagaaagcaggacttttgtctttagcagagaaatcaggtttctctctatcgaccatcgagcgtcttggattgctgaccaaagcagaggagttcggcgttttgtctgccgccacaaacccggaaacgcctggaacgttattcactttgagcctcggtttactccttcttggaccggtttttgcatatgtggttcctgaagattacacttgggaagtagtgattcaggttcttgtggctctactctctgttcttggtggctctgctgcttttgctgcttctggttttgtctccaatttgcagaaatctgattagcccgatcgttttttttttgtatcaaatatatttacccggtgtagcaagagacttttctgcatttaagatgaaaactttataatgtatttgatctacattgtatcaaccagtcattttcactattttctatctatgtaaatggtttcatatacagaatccaagagaaacgttttgaatttcaatacgtttacttattgtttttgttatgtgcaacaagaagaagttgtctgtcacaacagaacatgaagggtttgaattttccaatagactagacaaaacgttacagtataattagcaaaaacaagtttttttcatcaacagatcaactaaaattgtggtatccattaggtataaataagaacaacatatatctttctttttatctgaaaacaaaccaaacttaaacacttataaaaatctaaaaggactagtaacaatggccagtttgaaagttttttcttttgctttgatccttgttctcactttctcagttggtacgtcttctctcttataactaggggtattttctcgagtgtttataacactaacaaacttatttttgtgtttcaatacaaacttgttactttaattacaaaattccatgaactcatattaggcaaaactgtttcaattttgtgtgatattggcagatgttgaaggatataatgtagagagtggtggttccttgtgttgtaataaccacccgaaatttggaaagtgcaacacaaacaatgacaatcagagatgtaaccgttggtgtcacaatggatgcgggaatggaaaaggcgattactgcaaagctatgtctcacggaggactatgtcattgttattgttaactcacaattaaaaaatttatgcatgcgttaatgcgtttgtttgattactaacatatgtatgagtatgaaactatgaatatcccatgacttcataagtaataagaccacaaagccaaagagtttattatatactctcaaaatctcacccaacttgatgtcagtttcaatttataaagggcttttataaaaccatgaatcatgtattctgtaacatttttataatataatataattgatttggtgttaaaaaaaaaaaaaaatctcatcaccacataatctcaatttttgtaaccaaactagtagacttggatgttaaatctcggtttaaatgtttgaccaatccactatctcagaccggtgtaaccaaagatgtgtaacaaactctgtgatgatgagattgttaagtaggcccaaaactaaaattgaatccatacacatatttcaaaagaataatatgttattttgggccaactataattgacaagatatgtaacgatatttgactggaagtgtaactataaaaccttaggcccaactataatggattcaaattttgtattgggcctactttaacaataatctcatcatcacagaatctcaaaatcattgacgacgtgacgtctctcttctctccgagtttttgtaaccaaagcagtacactgggaggttatttatcggtttaaagtattgaaccaatccaatatatgagaccggtttaataatccttcgatttcgattcgaactttggtttcatctccccaaatcgaagcgaaggtctctcaacaatggcgaaatcagtgtcgacggcggcttcctcgcttgtgcaaaaccttaggcggtacatcaagaagccatggcagatcaccggaccttgcgctcacccagaatacctcgaagctgttccaaaggcgacggagtatcgtctccgatgccccgctacgattgatgaagaagcaatcgtgccttcctcggatccagagaccgtatacaacatcgtataccacggcagagatcagcgcagaaaccgcccaccgatccggcgatacgtattgacgaaggacaacgtggttcagatgatgaacgagaagaagagttttgacgtctcggacttccctaaggtttacttgaccaccacagtcgaggaggatttggatacgcgtggtggaggctacgagaaataatcaggtgattatcaaatttgagttttttttttcttgtgttcggattcatttgattattggattatgagctgatgtaatcaggttttggaccttgtggtggatatattgatttagtttcttcgtaatggcattggaattttcgactttagttttagggttcgtatctaatctcaaggctgactagataactgtggggaattc

SEQ ID NO: 120 - DNA, 110684 bp, Arabidopsis thaliana
aagctttctttggtgcaaattaagggagaggtcgtgagagatttcggaagaaatggagtgagacgtaagaggagagtgaagaagaacaagaagtcaaaaagacttatggggttttaagtcttgccaacttttcaattatttgaatgattaaatgacatattattcaatttaatgtcgtaataaaagtcttcataatgtcagtttttgatatatgaaattcgaaatagaaatctttagacatttaactgactatagatcaagatattttgagatcaattaagtaccccaaaaatattattgtgaccctacaacaaaacggtaagatacgtcattttcttaacgtcgttttggaacaatgacttatcaaacaccgagacaatactcaacacttttccgagtctgttgaagatttttttcattcaaaaaccctaaaaaataaactttcatggacggcactaataaaatttcaccatgccaacaacactcgttcaaatcgtgtagaaatcttaagtctacgacttgcaagagacacaataaaaccgcaatattgcttttgacaagacgaaattcttggctaaaatctttgaaaattcgatcacaattttcatgtcaagccattaccaaattcgaaatcagaaggtattattttgcatcctttcaagcactttgttcataaagtctcgatttgggaccttgctgttagaaagcggagacgattttgtttctagccatttcctccgaatggagaggctattcattcaagttcattggagtttgttggttttatgattcatcttgttctctccgtgaaaagtcttttgaattttcatgaatgtccaatgtccacaatcccgatcaatggaagggattgagtaaaaattcctaggatatatatggtatatcgatcggcgaatgtgggatccagaaataacaagttcacggataatagacgaatcaatataagaaaagatattgagtattagtcgactatggagtttctcccatgaacgatagatagggaaagaaacagatttcataatttgtttgcgagcaaggcttcggtatcgatacatcgtggaaattcacttctccatcattcttttgaatgattggttatgtatttgtggatatgtattttgatttgcttagtagcaatgtactcttaaagtatcaattcttgtacatgattccaaattaataaatgaaatagatgttaaaaatataataaaaagacataacttcatcataaattttctccactttgatttgacatgttagaacgtactaccaatattatcacttgattcttaaaacgtcattactttatagagacgccagtttttgctcgagacgttttggaaacgtccctctatctaaatctttgtcgtccatcaacggcaagtggtccctgccttgcccggaacatcttggagacgttagccatccggtgttggagacgttaaactgatgccaattaaatttaggtctatagaaagtagaactatcattataaaaactgaagaaaataaatgtcaaccatgtttcaaaaccctttcaaacccctcctcatacgtctccacttttcaagaaatatgaagatgatttccccataggacaaacatctgccaggttcatttaaaactaacaacattgtttcactaaaagtgttcattattgatattaatttccataatctcttctcctaggacacataatgaaaaaaatgtttctaaagttcaaggcaccagaaaggttaaggcgaaaaaaactcgacttctattacctgaaactacggacgatacaaacttatacaaacttaaacaaacaaaaaaatgaagaaggagctgacgaaaatcccaacgctgactaaattcaatcaatttttgatttcatatttgcaaaaatgtctaccgtccacagactattactgatggtgaggcctctgaaattcctggggagacaataacaaaacgccgacttagcaggtgatttcgattatggttcaaacaatgtgtaaacgttgtcgtttgtataagggtagaaaatagtgcctaattatgtctcttgctgttgttaggaaatccgcccagacagctgttccaaaagattctagcaatcgacatttaaaagggcgcagaaatctaataatctcatctgaatctgaacaagaataaacaccattgaccccggttactacacaacatagatgttcaatcttccgatgtagccaaccatggtcatgatgagaagagatctttcatgaaactccagaatgtttttttaaatattattgctctataccgttttttccacacttccttctgttgtacgttccctgaaattataaacattactatccctctctaatcagactttaatccattgctgaataaacaattatctaattacttacacttattacattattgaaaacctttaaaacaaagatgttcacattttccccgttgatttattttccatatttttctctacaaaaccatttctacccaattcttcttccagacattgtaattgctaagatattagtgttctcaagcccaatgacgataatgtccaattcaaaattttagttactttcaaagtttaacatacgttttgttaaaaaactatcaccaattttcaaaatttgaaatatgttttacaaacaacaaactcacattcaaattaacatttatatatatatatatataacaatattactctttggtcatgtattcataagtgaatatagtatctacctactctaataaaatttcctaatgaagtcttcttctcttagagcaaaggaagagtcatccagcgttctcctgattcaaaccgaaggtacggaagtctgtatttcttaaattttctaacttctttcccttattgttaaatttcaatccagtattgttgacttcttccccttactttccactcaatgaaatcaactttctgcgagaagaagtcaacatattcagagtctggagacatgatatggatgaagcacttaggagtctggagtctggagacattgtcaatgaaactctaatgtggcatcgaatggaaaatccagcagacgaaaaaacattgggaggcaaatggatttacaagctgaagaagaaactttaaaaacctaagcttcagaaatcgatttgttctactatgtttctttatattcccgatttgtgattagcaatttccaaagttaaacatttcaatccattcaacattaagagaatttttcataattttcccagatctctaatgtaatcttcaaatcaaatccattctacattaagagaatttttcactatttttcaagacacaaaatttacacattcaaaaaactgtgttcaataaacactaatacgttaccaaatatcaaatgacaggccaaaaaaaaataacaattaaatgcaaaaaatagtcatacgttagacccaaacaaaacaatggatactactcacaaacgccaactaacgattcattatgaaaaataaagaccaaataaacacaagatcaaaccatttaaatacaacaaagtacgattaaaatttcaagaaatttactactcattaataaaaccaaatcaatattctaacgacaacaatagaaaagacacaaaattaacacattcaaaaaactgtgttcaatatatatttaaaaagtcaaaacccataaacactaatacgttaccaaatatcaaatgacagcaccaaaaaaaaaacaattgaatacaaaaaatagtcagacgttatacccaaataaaaacaatggatactactcacaaacgccaactaacgattcattaagaaaaataaattccaaataaatacaagatcaaagaaaaaccttgtctccacatcagagagtgatctataaatatcaataacataaccattagtcaaacatcaaagtttcaataacatagaaagtcttccctattaaccactactggtttcatccggttctgaaaccaaagaacaacaagtaatcaacttgccatcacatcaacccaagccatatgtaagaaattaccattttaaggcacatgtgaatgttgaatggtgttgttccaccgaagcgataaaatatttatttaaatacatcaacaaaggggttgacaaagctaccattgttgtagacggcgaagacaaatcattttatctgattctaaacaacatttagacggcgaagaggcgacatcttagcacatctattattgtaacttgacgttaccatctttagaatttcctatattagcctacttctcaaatctttatttcacaagttatttctctttatacattccgtctctttctctggttctgtaataaaccattatcttattactatagtttgagcatcatatattagtgaggaaggagcataactaagtttgaatagcatgacgtttttttggtttttacttatttcctcccataaataaaaaagtatgttcaacagtttctgattccaaaattttattaacaatatcttccaatcaagaaaatcttaaaacagtaaatacataatcaacatattgaaatacaaaattcaaaacaatacatgtaatttgatttaaaaaaaaaaacattattaaaaaaccttcaacacttcgaaacatgtatatatattgtatatgtattaccatttttacatgtacatagcctcatttcgatttcacctactctttcaaaagcttcacgatgaacactggctcacctaaagcacatgtagagttatcacaaggcctcctcatccatttaacggaacctaacacaggtctgtattaactctttttcctttttccttttttttgataggatgtattcactctatttccaaacattcccactattttcttcattactaaaatatatttctgacctcaatcattttaaccttggatactttctgttattcaataaagcatcatgttaaaaatatatatatttgtttttactgtttttgagccaaaatatcaattcagtattatagaaataatattgtaaacttatgaatattgttgttgatcttaaaatataatttctcaaataataatctgtcaggaattgaagaacaaaatatcagtataatactttctacgccaaaatatcaatttcttttattctaaaataatttcaaactataacccatattataaaattataatatttacttttagacaatatatatatatatatatatatatatatatatatttaccatttttgagccaaaaaatcagttcagtaatatataaatcaaagttgtaaacttattaatatttttgttaagtaaaagaccaataatattgttaagaaaaatatatatttgtttttactgtttttgagccaaaatatcaattcagtattataaagctaagaaaaacgtacaatcggatgacaaaatatatatatatttctacttatttatgttgattagagctcaactgattaaatactttttttgtgatattttgtatttaaaactctttgtaagaatacatagacgaattataatttacgtttgaaatactatttattaaatccacgcatagcgtgggtcgtcacctagtatgatataaaggattaatttgatattttctcaaaacaccaagatcgagagcccaagagcaatatgaagatctccatgagaatcatcatcttctgtgtgacctttattgcagtttatgctacctccatgcagtgtcatgtctgggtttataggggcttaaggtgatttaaactcaggcacggcactgcctccatggctgctacgttttttaaatacattgaagttaaaaatataaaacaatccataaatgtatataaggtttctttgttgacaaaaaatgctatgtatttaaaaacgtttttaaatcacagtttaaaattcatgaaacaatccatgaataaaatgttagtgagattatctaacacatgtgatttcttttagctaggcttttttccaccactctttgttttttaggtgaaaaacaattaataatctttgtctaataataagaaaatatacaccaaatagacaaaataaaacttgatgaattcagaataaatactagaaataactaatattaccaaaaaatattaacgaataaatagaatttgcaacatttttctctacgtcaaattaaaccgtgtacaattggagaaagatctaccgcgtctgatttctcatttctcacaattcccatttttcgatttcactaagaaaattgttttcccagtacttagaatggaaacgtaaaattcgaagacccttatatgtgaaacgtctaaaaaaaaataggggctcagggcacaagcacaatcatgggtttggcaaaaacgtcgttgcgtttctattttctattcgttctttatttgcatctcaactttatttccgtcgtagactaacgatccttacgtctagcttccgttgacaccaaccatgtttccaccatatccaagccagaaggtgttattggctatggtggaaagacgccaaaattagcagtctttatccaaaagggcagtggcggtaggggaggaggcggacgtggtggcggtaagggaagaggaggacgcggtggcagatacgaccgtctaaagcaatctcgcggtggtctaggcgggtttccatatttttatggtatgtcgcaccaccacgctaatcggtcaagcagtagccggaatcttggaaggtcagggtgtggtttcggttggttaggtttattaccggctttggtagtgttgattttggtttcatagagttaattagtctttattagaactttaatttgaaagagtttcttagattttgatttttaatggattttgtaaagcatataatcttgtaggagtatcattaactagtatgtcacggctctttaaagagatcggagggatcaattaggtacggctctgtaaataagtatgtcgaaaatattagaatgaccttgaaggatctgaaagagccgacaataagatccaatcaactaacgctagggagaacaaaagagcaacgaatgccatttggaaatgttgtatacaaaatgatgggatcatattagcaaaattgtttgtcagctacctgaaagaaacgtcagcgcttggtcatacatgcagctaatttaatatataccttgttatctatactaactagtggcatcgcataaacatgcctgaaaaaacataggttatgtgcacgacaccataactatagattccgctactattccattgaacagctcgacggattttggtaccgtataattagttccgtttagacccaaaaggccatccattccgcaaaagttcagatagttcttttacatgatatttttggggtggtatgttctactttactaggcttatgtatttattggtgtattaaccatcagccaaaaaaaaaaaaaaaaaagaagcaaattctaaatttctccagaaatcgaattagcctaagaaaacattctatatatttaaaatcatttaaataacaatgtattaacgcttgtactttgtaccgtttcatttactagtatcaaaaaatgtaatcgtatttataaatgtatctaatattaaatttgatatgaatggtatatctaatctacctaatatatataagtattctaattggacttcaaaactaaaaaataaagtaaaattcagagataaattgactaaacacatgaccattaacattaagtaaacaaaagacaataataaaagcagtttcatcttgactaggcatggacgttcaagtatagattcgatttcatttcagtctggttcgccgattctttcggcttttaagtttaggatccgttcggatattcttttcaaatattttttgataatttagttttttggggcatttttctatattttcgaatatttttggatattttgggtaatttttgattttttgaatattttttataattttggaaatttagttattcgatctaaaaaataactaatatttttgaatatataatcatatttcagatattttcgggtacccaaaatatggactgaaccaatttttatttaccattcacaaatcatgtccgtagtggtgcggaccaaaaattaaccgccatattggtcctgaaatcgaattagcataaaaacattttatatacttaacatagtttaaaaaaaatgtattcatgcttttacattgttttgtttcattttactagtatcaaaatgtaatcgtatttataaatgtttagtgataaatttgatataaatggtacctaatatatacaagtaaattgtcatttcctttaatagattatgtcaatggacattcaaaagtcttacattttctagaggcagaactcacacaaaattaaatttatcctttcccaacgaccgtcgaagctagcaccgatttaccgctggataaacccacgtcagtggatgaaaacgttttagttcacaaattcaaaagtatttgagtgaacattttgacagagaacgccaattaagaatacactaatatacgtagtattaatttagaaaatctaattacgttttatcaaccaaataaaggtcaaactatttatcatccaaactaactaaacatgctaacgtgtcatagaggttaattagtttttaactttttataacaccattattgttgaaactgttagaagttagaatcataggtggaaaaatttacgcggttaactataaatcatgtttttatttttaccatttacccttaacagcaaccaaaaacaaattttgctattaatttccagccaatgagattatgccatctcagcaatacaagtctttcccaccattcttcttttctcaaagtttctctgtcttgtctttttttgaatctcctttgatgtcttccctctctgtctaacatattcctcgattcttgagctttccaggtatgtcgaagtcgaatcatcaatatatgtttagaagcttattctaatggtctgctgttataggttataattgtgaatgcgtgcgtaacacgctaggtgctctcgtttgatgcagaaatgaagagtgaaggagaaagtggtccatttcagggaattcttcgagatatcgaaggtagacgaaaatgttacaaacaagattggattcgtggcataaaaaccggtattaggtaaggttaattatatttcaatctttcttgaaatttatattgatgccaaacattgaattacttgatttcaatgtttcactagaattttggctccgacttgctatattttctttgcgtcgtctcttcctgtagttgcctttggtgaacaattaagtaaacatacaggtatatatataaatatttcttttccatgttgcttttttatgaatcgcctaaagaattaactttgatgatttttacttaacttgttgttgaaaggtggagctctaagtgcagtggaaacattagcttctacttcgatatgcggaatcatccatgcgattttcggtggacaaccattgttgatagttggagttgcagagccaaccatcattatgtatacttatctttacagtttctgcattagtagaccggatatcggtcgagaactttacctagcttgggttgcatggtaatgatcacaacaaatcaataatcttgttagtgtacgtgcatgtaatctgctttctaagagtttgttgttatatgttgtttctatagggtttgtgtatggacttcagttttgcttatccttctttcgatatttaacgcgggcacaatcatcacgaggtttacgagaatcgctggggaactttttggcatgttgattgctgttctgtttttacaagaagctataaaggtataaccaacttcattttctaggttacttagtcaacaagtaacatacttagttataatacgttttcagggattgatcagtgagtttcacgcccccgagattaaaaatcaagaaacagggaaatctcatttcctcttgatttatgcaaatggtttgcttgcggtaattttctcgctaggccttctaatcaccgcgctaaagagtaggagagcaaaatcttggaaatatggttttggtacgtcattgtctatttacattagttcatgaaaagtgtacattgatattcacttagaccacttataactatagggtggcttcgaagtttcattggagattacggtgttcctttaatggtcttgttatggacggcattgtcttacacagttcctagtgaagtccttccaagtgttccccggagactgttttgtcctcttccatgggagccagcttcattgtatcattggactgtagtcaaggtaagattaaagatatgcaaaacatgattgagtgatcaatacaaatgcaaaacttatagaatacaaaacttattatatacaggacatggggaaggtaccgataatgtatatcttagctgcgtttatacctggtgtgatgatagcaggactttacttcttcgaccatagtgtagcttcacaaatggcacaacagaaagagtttaatctaaagaatccttctgcttatcactatgacatcttcttgcttggaattattgttagttcttaaatgttcttaaaacttatttcaaagatacttatttcatggcataaataccaattaaatcttgttgttatggtggtgatctatagactttgatatgtggactacttggacttccaccttcaaatggtgttcttcctcaggctccaatgcacacaaagagtcttgcggttctcaatcgtcaagtaagaacaaatacatatatatatatgagaagaagaaggagagttgaaacagagatgatgatatattttttgcagcttatacgcaagaaaatggtgaagaaagcaaaggagtgtatgaaaatgaaagcaagcaaatcagaaatatatgggagaatgcaatcagtgtttatagagatggagacatccccacctcaggttagtaataatgccttctcctatatttatagaaagaaattgtttgaaattaaagaaaaaaaagaaccttaaattttttgcaggataattctgtagcaacagatttaaaagagttgaaagaagttgtgatgagaccagacgaaggaggcgatacaaaaggaaaattcgatcccgatgttcatatagaggctaatttaccggttagagtaaacgagcaaagagtgagcaatcttttgcaatcagttcttgttggtttaacacttcttgcagtgacagtcattaaaatgatcccaagttcagtactttggggttactttgcttatatggcgatagacagtctcccgggaaaccaattttgggagagattgttgcttctctttattcctcctagccggcttttcaagttagttaatatatatcttttctttagtctatttttagaaaggtctgcctttctcaatcactggtttcatctaaatgcagagtcttggaaggagtgcatgcttcatttgtggagttggtaccatacagagtgattgtaacattcacacttttccagttggtttattttctcttgtgctatggtatgacatggattcctatggccgggatatttttccccgcactcttctttctacttataagtataagagaacacttgcttcccaagttattcgatatgcaacaccttcaagtgttagatgcttctgactatgaagaaatagtagcagcacctatccaacactcaagtttcgcatatagggtaaacctttggtctcttaatgagtttaaactgattcaggggctttttgtgtacacgtgtgtgatacctttaaaccattttgtgagcagaaactagggtcttctcatcatttatcagaaggtgaagatgaattctacgacgcggagatattggatgagatgactacaagcagaggtgaaataaggatccgaaccataagttttaaagaggtaataaaaacaaattatatctattctacacaatccaagcattgatatgaaaaaatgcatataaacaagaatcttgtttcaggtgcacccggagcctgaagagaagcatgtaacctttgaaccacattaaaaagaatcttttgcaattgtttttgtacacaactgtatttgtgcataggcatacattgactatgttataactttccttatagtggaactttgtttcagcaattaaatatgagattattcagcattcaaattatccagtacttgctgcattatggccatttattcgggtgacggtgaaagcattatttataagcttatatatatgtcttccgcttcatgaggatagctaatagctattctctaaatccggatcgatcacctctgccatgaataccttgtcacctcgtattgcttgctttgcaagaaaaatgcgccaaatttcaagaccagttaatagctagcaagaataacaatggtacaccagtcaaagttattttagaggagataaaagattttcacaacgctttttgctttacacgtcatctctcggttattcttctgacacatagcgtggctccaaagtaatcatattttcaacgtattgcagagagagaggtcgaagaagataatgatcattgtatagtgtaaaggttcaaagttgattagcatatagctctgttcttgagtgatggataagaatggagaattaggtcttgtttcttaatacttctcgtcatatacgagttattgtatacaaatgcatacattgactatgttataactgtcttatagtgaaacaatgttttcagcattagtaacccttatatagtttctcctcaaatctgagctatagcattcagattatctagcacttcttgcatggttggtcgcatcttcgggtctacctctaggcattgtttaataagctcgcacataagtcttcccgcttcaagtggatagctattcttcaaatctggatcgatcatctccacaatgttgtactttttattttttatttctcgctttgctgagattgtgaggtcttttcctaaaccagttaacattttaagtagtataacaccaaagctatacacatcgcccgccatgttcgacatcccttcatttgattagtgcaatcaattaaggttagtctctttgaatttaatggtcacttttaactttaagatataaggaagaagcagaagattgttgcctgagagtatgtattcgggaggtgggtattgatatctaggtgctacatttgaaaacccgatggtgtataccaattcatcgagagaaacttttggctttccaaaataggaaactcttgcgttgaagtcctgcatatcccataaatgtcactttaaaggtaaggagcaagtattcaagaaaaaaaacaaaaaaggcaaggtgaatacaaaccgagtcgagcaggattttcgaagcagtgagatatctgcggtatagaccggcttgcttcctagagtgcaagaaggcaagacactgagccgctcctatggatatcttaagtcgtgtctcccacggcaatgactttggacgactatctatgatattatataaaccattaaatccaaaaggaagatgaattactattggatctaaggttaagatcgtaaactcgtgagagctccagaaatcaatttgagcaactctctttattccctctctatgatattaaattatctaggaatcatttagcttggtgttcttcaattagtatattttcctcacttccactaaataaagctctaatgagctatctcaatttttagatctagttttaaagctcttattaagagctcttacctttgggtcttgctcgagcaagattcttcttgctttgagtctactcacaagatataatgacgaaaaggagatgaataaacttaacttccttacctctactgatgtaacttcctaagcttccatttggaaagtattcagaaacaataaacaacatatcacgatcataacagtagccaattagcttcaccaagcttggatgagagttatgtcgtagaaactctacgtcaacctacaaaaatatcatctctaatgttaagacacactgacccatctctaggggtaggcaacatagacatttaccatccaaaaacatcaaaaaatttagaagaataaataagtaacaagaaacttaacaatattattggttttgccgaaggttctcctatagattgagatgatataattacttacaagccaatcttgaaaagcttgttcattggctaagtaaattttcttgaccgcgacggccatgccaacacctttcttggccggagataacgttttgggattgatgtatcccaagctctctcctagttccatctggtttccgaaatcattagtcgctttcttcagatctgccaccgtgaagactttcacaccctcctccactatacatatattataacaaaacttatatccattatagtaacattcaaatcaaaagtacttaaatccgcagagaaatatatatatgtatacctgatttgggagcatttggttcggtgggaagtgtcgaagctgagagacaatttcccattcggatactctctgctaaatcttaacactagagttcaatgaagaagagaggacttttagtttttcacaccgaggagcaaagtcaacgaaaacgcgtttgagagtcaacggttgacgcgttttatttggtgagtcatacgacgccgttttttgataagagtacatactacgccgtttggctagagtttcatacgacggcgtttaaacagatgtctctggatgcttcttccttcttcgttcccgggttaaattacaaatagcggcgaaggggtttcatcacaattcacatcttcaacgttactccgaagaagataatggcgtcgtttctccagagactagtagatcccaggaagaatttcttagctcgtatgcatatgaagtctgtttctaatcgcctccgcagatacggtactctttctttctctcttaccctagaaaccaaaccctaattctcttctggctgattttgggaattttacgattttttaggtcttagatacgacgatctttatgatcctttgtatgatttggatattaaagaagctcttaatcgtttaccgagagagattgttgatgctcggaaccagcgtcttatgcgtgcaatggatctttctatgaaacatgaatacctcccagataatcttcaggtatgttttagtctctaagtaagtgacaacagagctaaaacggtatatagctatggagtttgtagatagagcttgcaagatttgacttaagacttgtattaggatcaagaacactctgttttcagaaacctgttttggttctgtaatataattgtaacttgataagctttgtaagatcttgtctatgaaagaagttttttttgagatagtgcttgttagttgtgagataggaagcttatgtaaatctttttttcttttccttgtctctgtaattccacaggcagtgcagactccattcaggagctacctccaagacatgttggctcttgtaagaacaaaaacagttttatctatcttgtagtgatagaagaatcatatagcaaagttctaacacacgacacttcatgtgcaggtgaagcgggagagagctgagagagaggctttgggagctttacctctctaccaaagaaccattccttaagcatgttagtctctcttgtgcttatagtagggtcactgttttagtactctttaggcttcaataccgcacaatttgcttttgtatggttatgcatggatatgtgaaccttatgtataagattttatgagattgaattggatgtgtaatgtaagcttgattgagctattacagaaatatgagtaaaatatcccacaccggtaggaggagagtaaatcatgctacataaagacataaaggcacacaaacccttaagctagcttttggaaatgttttcacagttcctcataggagctctgaagagaggcgtgtaacctctgaaccacaatcctttataacccttagtttgtcctctcaaatatgggctatagcattcaaattatctagcacttgttgcatggatggtctttccttgggatctctttcaaggcagttttatgagcttgcacatacgcatcccctcttcaacacgatagctattctctaaatctggatcgatcatttccacaatgttttcttttctattctctgttgcttcctctgctaagatgatgcacgggtttcccaaaccagttaagatctcaaatagtataacaccgaagctgtatacatcgcccgccatgtgtgatctccctgtatatgcgtattaccgtgcaatcagttttaggttagtgtatgaattttaatggtcattctgtagcttgagagaggacttacctgagaatatgtattcaggaggttcgtagtaaattctaagaaatgcgctcaatacaattttctagcttgcttactcctataaatgtaacgctctaagcttccgtttggaaagtattcagaaacaatgaacaacaattatcatccgaaccgtaaccaatgagcttgaccaagcttggatgcaggttatgtcgtagaaactctaggtcaacctacaaacctcggctgccgtgttaagcatacatatatgagtgatcagtctctctcgtagaggttaatttcttacaaatcacttttgcaaggcttcttcataggttaagtaaaatctcttaacggcgatggccatgccaacaccttccttagatggagataacgtcttgggattgatgtgtctcctcacacagattcatatatacctggaattgttgcaagttgttcggttagaaaacagtttcccatgcctataagatccgctttcttgacagttaaacagagtttgaggaagaagatgattcaccttacttatctagatctactccaccgggcttcaaggttctggagtaagccattgagtatatggacgtctcaagtcaatgtgttaaaatgtcaacgcgttggaaaatgtcaacaagggaaccaccaacttttgtagtttatagttatagttttaaacctatgacgtggagcacaatattcaagtttgtagtttaaattgatcttgcaagattgaacataagacttgtataaggatcaagaatcgtctgtgtttaaagagcccttttgtgaacaaccttacataattagctttttcccatagccaattttgaatttttttttttgtcgtagccaattttgatttaatatacacaaatattcatattcatattcatatctttttttttcgtagggttcatattcatatcttgtgctaataatgatcaaagaataatagtttatataattttatgaatttgtagtcttgtagcatgaacttttctctgtcttgtagtgttagggggcttattgcaaagttcttacacgatacttcatatgcaggtgaagcgggagaggcttcgggagcattacctttctaccaaagaaacattccttaagcatgttagtctcttgtactatataactaaagcccacttaaccaaacattccttatggctctttaggctccaatctaccacacaattttaccttttatggttatgtacggttcacttaaacactgaacttatacataagattgatgtgtaatgtaaacttgatcattaagttagatgttaatgtttacacaattcctcaaagatgccacttttaaacattttttacatgaatcatatatatacaacgatgctttgcacggtctagtgaataagtgtcgaggtagataagaatgagataaggtatttaaagtatttaatagagtggtgtcagtagagagaacgatatggatttgtatttgaagacatttccatgtgagtcacattagcacaggagggtcctttgcctaaattcattaatgaattacttaacagaaataaaatgacaatgttcaattaaatgtgagtagacttactcctattcttttctctcacttgccaaatgccaaattgccaataattatttattactgatgattattaaaaaaaatatttttctttttgcggagatttattaaatattgcatgattttaaaaaatagttatagcctagcttccaaaaagccaaatttatgtagctaaatgttaaaacaatagtatatggccacacttccaccaatcagtcttactatcatttgtctcttatgcggttttgaaaggattttggtgcttctaatttcgaatttagagggacaaactaaaattacgcaatatttgaaaagtaagaattattgctattaaaaaatcttgatacgattcaaaaaaaattatataaaaaatacggtttttaattatttaaattttcagcatctttacacaaaaaagaaaagaattcattctcatgttcaaaactatctattttgttaactttgtttttgaattatgcaattttaaatatatttcctaataatactagggatgtttgatcttaaaataaaaacaatttggtcttagtcatcaaattttaattttttttgggtttttttttgccgtctatatttattatttattgcaaattatgagaactgtttcatatacaattctacccagaacaatttttacgactcttattagatctacgagagatgatatctccttcttcttctccatgcttttgatagacatattcaatgatcctctttacgtagaatcttgacgaacggctataattgtacatcgttggagatctcatgtacatttacctccattaatctgcaaatttgttaataaatcttagtatctgggactcgaacctcaaattttttggtataaaaacattaataaacctttcgtcaatcaaagggatttccaaaatcacgcaatatccctacctaaactggaaactccgacccaaaatcaaacaaaaatttgaattcaacatccctacctaatactacgtatattatatgaatacaacgtacctcaaatagtattttgtctttaccaatataaattatataattataacggacctactaatatatatacaaaaaaaggttatcgatatctcttctctgtacaagagatcgagtcatgaggaaatgggcccgtaaaagagtaaaagaaatgtacaatgaagaggagacaaagccatgatcctgccttttgctttgatctcttcttttttgtatgggttccactacgttcgttacccatgccccacccacgttttcgacggttcctcgtctttttttggttcttctctcactcttattatacacttgtttatcttttttagattcaacattttaaatagtgattgttgtttgttcgaacttgggtcttataagtcctaatcaacatttaattggatccattagaaacagttctttcattggagctacgtgttacgtttttctgatatatgataaatattacaaataagactagccattttagattttcaaccgtaagtatgtgtagaaatacacggttttaaatttataatcaacaaggtagtagaaaagatagatagtccacactagatatgagtaaaatatatacatcaagtcatattatataaggtgggaactatttgtggttttattataatcgttagaacgatatctcgaatttatttagctcaaaaacaaatatcactagaaaactactacatcaaaatcaataccatttcttacaaaacaatatggcatattgatagaagaatgtacaaatcttcgatgccataaacagtcgcatcagaacagttgcatgaccgtgaccatgcgaagtagtgtacatcctcatcctcacgttcgaatgaacgttctcgtaaatcgttcctacaacacatatccctaaagagagagcaacacatcctgtttgtttaatgattcggccactaaaataaacgtgtagttaagaccaaaaacgtaaagcacacctgattagaatattgatctctaagagtaaagaacgcatatattggtggttttggcggagctaaattccaaaaaccgaacataagacaggtagttagaaatgattttagagtatttgtttttaaaaatgaaatcctttagaaaatgcaatttcttgggacgataagaatgagaagaagacacgattctgaatttttctgaggccaacttcatggccgactttggaaaccgcattcttagccactgaacggcgcccttaataccatagactattctcaattttgttattaaaaatacagccaagaaacaaaccaaaaaagagcacgaagaagacaaaagacttaaaaaaaagtttcaaaaggaagagatttgtgggtgtaacacatgccacgataaacgattctcctagtaatagtatctgtccaccgatgatctaaacgaccaatttggcatttcccagttactatcataattaatcatatttgtcacgtagattcagatgtaagattactaaaaaacatctcaattattttcacaatcttagacttaagtgtttatagcatgtggataagggatcatgatcataagtttatagttatgtttagtgttttgtttttggtagttttagtttcaggcggttttgaaacactttttccgatccgacctatactcattttattttttttgttttatttacaatttaatttacagattagacattaacacatattttcaatttctcaaaattatccaaaatattcatatcttaaagatgtgaaaatttatcagaattagtgaattcgaagtgtaatttagacgatttaaactatccgaatccgatcaaaactatacgattaaaactatccgaatccgagccaaaacggtatttagtaaatttaatattttattccgtatatttctagcaatatatttaaatactcctgcccattacctgtttatacgcaattacctctaatcatctacaaacctgtcccaattggacacttctggcttccccagtcacagcctaaacagagcttgactcaataaacagcaaatataattgcatcaaaacaatactttttttttacaaattttttattccggaagtaaccccaaatggtcaataaggttccaaatctctgaaaaggaatgaggtcacaaccccacgtgggataccaactagccacagtggcacacactcgtaatatatagaaacctccaaggtcattttcatagttctatccccttataagcaatagccacaactctctttgctaattacattttacactcatctcgttctctcttccgtcaatatggaaggcgtcaccgtcgtgtctttcttccttcttttcatcgccaccgccatggccgccaagtccaccgtctccttccgtgacggtaactctatttacacatatacatacacatacattcattacatattccggtttactacattaataacaaagttctgatttatcactttcaagtctgaaaattggaattggggtactatacaattcaagttttttttttccttcaaagtatattaacatacctttttttttatgttgatatatcttgaagaaaaaaagcttaaattgtacctcaaatccaattttcaacctttgtgtacagtaaattatggcaattttattttttattttcacaaatttagtgggaacaaaaactcatttcactcaaaattttatatagaagcgagaaataaaatcttataattataattgtgatatgaataatcaatataatgctggtacctaaaaaaaagtttctgaatggttatgaatcataactttgttggtatcactagtacgaacctgcctctgctagcgatagtacttaaaaacaaataaaaatattcgttttgttacgctttaaaatttagattttttaagaagacgatgtaataaaaattacagcttcctttgcccatgtttctgacacaaacacaacaccataaagtttttggacatttccaatcaatgaagttgagagtaggtcctttagttcatgttacatttaggaccagtttaggctgtcttcggacacacctcacgtgctctatgtatatctttttcttttaaaaaaattccaaaattcctaatattcacaaggacattttgataatatccacaggcatgttaccaaacggagacttcgagctaggaccaaaaccatcagacatgaaaggaacagaaatactaaacaaactagcaataccaaactgggaagtcacaggattcgtcgaatacattaaatcaggacataaacaaggagacatgcttctcgttgttcccgccggtaaattcgctgtaagacttgggaacgaagcatcgatcaaacaaagacttaaagtggttaaaggaatgtattactcactcacttttagtgctgctagaacttgtgcacaagacgagagacttaacatatctgtagcacctgactccggtgtgattccgattcagacggtttatagtagtagtggttgggatttatatgcttgggcgtttcaagctgagagtgatgttgctgaagttgtgattcataatcctggtgttgaggaagatccagcttgtggtccacttattgatggtgttgctatgagatctctttaccctcctagaccaactaatagtaagtcattactataaatactctgtttcttgctctgtttttataatccttgaacatgtgaataatgatgattttcttttatgtttgatttggcagagaacattttgaaaaacggaggatttgaagaaggtccattagtattacccggctcgacaactggagttttgatcccaccgtttatagaagacgaccactctcctttacctggatggatggtggagtctctcaaagctgtcaagtacgtagacgttgaacatttctcagtcccacagggtcgcagagctattgagcttgtagcgggtaaagagagtgccatcgctcaagtggttcggactgtcattgggaagacttacgtgctgtcttttgcggttggagacgccaacaatgcttgcaaaggatcaatggtggttgaggcttttgcaggaaaagatacacttaaggtcccttacgagtcgaaaggcacaggagggtttaaacgagcttctattcgatttgtggcggtttcgacccgatcaagaattatgttctacagcactttctatgccatgaggagcgatgatttctcgtcattgtgtgggcctgtgatcgatgatgtcaagcttataagcgttcgtaaaccatagatgaatcaccaatcctattacaagaaaatgcatcgtgtggtcttcttttattttccttaaactgtctttggtgtgtgttggattttattgaaacgagaaggtgaaaaaaacagagttttatttacgagagttagggttttatataggcagatgggcctttgcttatattgtattttcttgtatgagaaggcaaaagaaacgttgcctatatcttatgtatctaggccttttaatttttatggaagagttacaaaacttacaataaagttgtatgcatattttacttctcacgagcatataagactgaatcacaatcgagcatttccaatgaagtaacagaagcataagaaatttagcatttaagttttgttaaagcaacataagggtcacatataaacattacaatagtaagtttggtaaacacgaatgttaaagaaaagagactagagaggactcatctcatgttttattgatgaagtgcactctaacagcagtaaccagttctccagagcgttcaagttcacaaaccatagagtctccggttttcagattgtactttcgacataggtccacccagccattgaaacaaggggcactgccaccgccatagatcttagtggagccatttattttatctccgggaagaaggtaatgcatgggggacaaatggggaccaaacttcaagccatacttcttaatcactgttttgggcacatactagttgcacattgtacatgagaaatagagagaaagataagtcttagatttagaggcaacaaacgtaaactagaatcaaaactgatgaaaacactgctcttattaccaaaacgtcattcccttttgtcagcgttttcacaaagtaagggtttttggggtttagaaggtacagctcagggtttttgatatcagcacaaccatgtgtctctcgccaattgtctgaaaattctgccaaaacagaaacaaaaagaagcaaactttggcattgagagaaaagaaaagagtagtattgagtatgaagagcatcaaaacgattctttcattctgaatatagccataccagaagcagaagcagaggcagaggcagtggttgtctccttgtgagaattttttggtgtagtaggatgaaatggttcagtttcaggttcaacttcaggaggtgcatcgatgatctcgttcccatcattcttaaagatttgcacttcaagaaacatcttgtcatcgtgtctgaagaacacgttatcatttgggcctaaatggttgtcatccacaaactcatcccaatcttcttctatcataaacagatctttttcttctcgctccagccagagttgccaagaattgccccaacgaacactgaacacaactctgtgctcaaaagccccgggcgtgcttttcacaaactcttccggaaaactcctcttcataaagacagaaatcataacagttgacaacaacaaacgatactgacattagaagaaggaaacatgagactaaaagctaaaatacaatcagcagaacacgagcttgtcaagcagaacaagaagcaggaatcattgtgccattaaaatctcctcaaatgtttcttgaaagatcaaaagctttttcgaacaagaacaacaaacgaacaatagatctttagagcaaacaaagaagttcaatggaaataacagtgagtacaaaatcaaaggagctacattttcgaaagattagaaaagaagagagactaattttgttttaccatggatttagatttccagttttgtcctggagacagagacttccaaaagcaaggcttgctcacatttccttgtatcttatcagtagcattcctaggcaacatcttgttctcttcaaaagctggatggattcggcaaaattagggttcataaacaaagacgaagatgacttgcatgtaatgaaatcagtgaaacagtaaaactggataaaaattaaacctttaatgcgttatctcgcttttcttactttcagtagctaaacccgaaagtgttacaaagcagagaacacgaaaatggtgactaatgagagacacagagaaaaacgaagaaagaagcaaaatttgtacggtcaaaggggaaaaaaacttaggtcagaagtcagaacaaagtaaatgcgtaaaaggcaagtaattgcgtcaaaagtaacgtcgccggagcatgaaattcacgcaccgtcgcagtcgaagaagcttcctctcgctgctgtgtctgctcttctcagcccttgttctccaaatcgaatctctctgctttcagaaagagaggagactcaacagtcaacagcactgtgacaagtgtcaaatgtgtactgtgtatggaaataataaaatggtcaaacaatattattgggccggatatggcccatattagaaactggcccatcatactctagaatcgattcgattgcaagtgaattgacaagtttgttaaactaacacataattgacacatttagcattgttacagaaagttgtaaataacatattgttgttactagagaggattggtctagtctttcttgacgaaatgcactcttacagcggtaaccacaccaccggagcgttcaagttcacaaaccacggagtctccgatattcagattgtgcctccgacatagaaccgaccagccactgaaacaaggtttcccgttatagattctattctcgccttcctcttttttctccccgggaagaagataggtaatggtggacttaacgggaccaaacttcaagcgatagctctgaaccaccggtcggctcacatacttgcacatacagcaggaaacaaagacaagctttagctttctaggccacaaatggaataaaaagctgacaatgtaaacacttgtattattaccagaacgtcgttcctttttgtcaccgcttgcacaaagtaagggttttcaggattcaagaggtatcgctcagggtttttgacatcactagaacgttgttttcctcggccatttgtccctccatttgctgagaattccaccaaaacagaatccaatcaaacattggcatagagaacaaatgatagtttggagtttgatgattctatcgatctgaatagccttaccagagcagccagagccagaggcaaaggaagaggcaggggttgtctccttgtgaggtttcttgggcgtaggatgaaatggttcagtttcgggttcaactccaagaggtacatcaatgatctcaaccccattattcttaaagatttgcacttcaagattcatcgtctcatcgtgtttgatgaacagattatcatttggacctaaatgattgtcgtctacaaactcattccaatcttcttctatcataaacagctcgttcttctctcgctccagccagagttgccaggagttttcccaacgaacactaaacaccactctgtgctcaaaagcaccacgcgttcttctcacaaagtcttccggaattatcctcttaataaacccagaaatcaacaaaacaatacttacattcaaaagaggaaacatgagactaaaagttataactttctacagaaaaaacacaagcagcaaaaacacgagcttaaaagattggattgtaggtcaagaaatgcagagaaaaggactagaaccaacactagcataaacatgagctaagggcaaacgaaacctgcgacgtaaaagtacccataacggtagctaaaacaggtcaataagtaacaaaatgaagaccaagcagcaagaagcagaggaggcattgtgccattagaatgtctccaaagtttcttaaaagaagaaaagatctgaactttttcaaacaacaacaaacgggtagttctgtaataacttgtctataaaagggctaaactaaacatgaaaggattatcacatcttactgttctagcaacaacatccaaagctataaacttgtaacaaagcaaattcaatagaaagagtctaagaacagtgagtaaatatcaaaggaggagtgagtcataattgaagttaccatggatttagatttccaagtttgtcctggagagagagacttccagaagcaaggcttgctcacatttgcttggatcttctcaatagcattcttaggcaacatttttcttttcaaagctggatcagttctgcaaaattagggtttgtatgatgacctacttgcatttgttcataaaattagagccaaaaaattggaaaagtaaaaaaagaacaaacactttgtacgtacaaggaggaacaaaatatctctggtcggaaaaaatgaagaaaagtggcgaagaagcaagtaataacgtaaaagtaacgtccctaacgacaaaccttaggtagtaccgccggagcgtgaacttcacgctccgtcgcagttgaagaaaacttcctctcgctgcggctgctcaaataatttaaagtgactgagagagagagagagacagtcaaaagactcatgtctcatgccaatattatggtcactttttacggaaatttgggtaagaaattatgattaacgggccgaataaggcccatttaaaatactggcccataaagttaaggatcgataacaaaacgtaagttcatcagtttgaactttatcagtaaacaaaaaagtagtagaagcttgttcaggagaataactgattccggtaattggtcgcgtcacttagtgcatcaaattgtgtagtcaagaatcgaatagataccgaagcagaggagccaccactgctacacttaaactgtttccaagcattgcgtatctgcacaaagaggagttcatgagattcatgttcttgtgttcaactatttccacatttcaaacaggaagtacgggagaaataagggtattatgggttaaattctatattcgaatcaaaacggtgcctctgttatacttggatgcacataatctatatagacagtagctttttctggcttagatggtgttgacggtatgaacagcgtacctttgtcgaaggcttatgtgcttggggaactcaaaatcttcagggaatgagtgaaagttagctacctaaacaaatagaaaccgaacatcatctttcaatgaaataaagctgactttttcagtgaggcattagtagtaaaagtaaaggacagtgcttaacctctctaggggtgaagtatctaagccgttgctccttcaaacaagattccttacccttgatttttggctgcgtgatcacagattcacgataagcatttcttttcactttgcaaatacagaggaaagtaatattgtatactccatggaagaacgtacctggacagttgccaatagggaacctgtgcccttcacgtatcgataataactctttgtgaaacaacaacatctctttgaatcagggtaaacaatgtccattgcgtttccccatctctctatcaaactaactggtactagatactgatgtacagagtctgggacagaatcgccttcttgtccacaacaatctttggacccattttcagagtcatcaacactacttggctcgccatcaacatgtgcagctaactcgagaaacttctctactggtttgcaaaactcaagtaatttatccaatccttcttctgcttgacattttccaaactcaacctgatcatcacgcccatataacgggtctggagaccagagtagtttgttattactgtgttgggacttaaatggcagaggttttcttttggcctacaaagacaccaggtaaatcaaatgatttcaaagttagtgacgttttaactaaaacaaaaagattaacgcatatacatgagaaagtgcacactacatgagaaagtttcataatcagcatatacttatacattctcagactactaaaattaacagttttaggtacacagatatgcactacgcaatcataaggtaaagagaaagtaccaggcagaaataacgtggtcttgaatacggcacaccaaactgcagcggactcaatataaactcttgtgtgacataatctaattttgttaatgtaccaatcatttccatatgtgtatccgaagtctgcaccaacaaacaccaccaataagcaaaaatgtcacgacttcaaagaagatgatcgagaacaagtactctagctgggaagcataagcaaacactatacctcaaatccaacaacattctctacaaataacatttgtggaggctttgttgtatgcggtataagctcaagaatcctgagaaacgaaaaagcccgagcatcaccagagtgtttctgaaggcctaaccaaaaaaaaactgttagtatccaaaagcaagtcatgttgatagtaaagaaaacaacagtgaaatgaatcaccttgtctagtataaggttgacaaggaggagaaagaagccaagcatctgcattatacttatctaaatcagcagcagtgagactctgaatattcccctatgaaaaacaaccaaaacaataagaactaatcatggactaagtcacagaactagcatcatctatgatttgcaaatgtaacaatgcttctattgattatatcatatataagcattaagcaacctgatagggacgatgtttgaaattatgttgataaacatcattagcagaatcattgatctcaaaagcttctactacttctgagacgatgcctgacgccattaaagagtatctctaagagcaaaaaggaattagggtttatgagacagagtagacttcactaaaaacatagaattggaggtgaaggagactgttaccattccaccgattccactgtagaactcgagaacttgccatggcttcttctcattgattctctgtaattcttgttccgccatgcttcttcttctgctgctgcttaagcaaaattaatttgggagtttttggttattgttcttattcgtttgggtaaattaaaccgtttttttatattgttctgtttagtaatagaaccataccacgcttgttcggtttattgttagaaccatgttttttgttttttgtcgtttttctttattaattagcaagaaaaccctcaaactagccaatatgtttcaaaataaccctcaacttacaaaaaataaaaaacaatccttaaccaatttttgttttttttttcgttaaccaattttagttaccactgttttatatattaaggttaaggatatgttattttggggaattacatggcatatcaaacactttgctttttagtatgtgtgaaagtatgttgtgggttttttatgtctaatctttcatttcatggggatataaaattagctaacaatcaacaaattaacaaacaaacaaaaaagactctagctaacattgatctaggctgaatctttggaccttctagtgttcttcatgttcatactatatgaactttgattccacgtaggtttgtttggatggttttagtgagattgaaaaggattgatagaaatattttataagtaattcatagttagagtgaggtacaaagttgatttacaataaaattgagaaagacccaaactacaatctagaaatttaggaattgatttttttatttcgatacgcgaacacggaacctacaaacactatctatttgatctccattcatatgcgaggaattaattactcttgcattattgatcatatgtaagtagataaattaactttctaaaaacatttcggtcgccatcgtattagttgagatttttgattactacttatgtaagtgcggatgaggtaataataaagtgcagaaagtaaagagataagaaatttgttaacgaggttcggtttttcctactccccgggaccacgtccagatttcgatttcactagaacaagaaagcaaattacaatgaattcgcaaacgcgtaaaacaagcacacccctcttgatttaccgctcccttctataaacgtgaaaccttaaggataatctctacccttaactaaactcccctgagtctagatttaatcaggataacctaaccctgagttaaactccttctgagcctagacttcaattctccaagtctctggaataaccttcacgcaccaacaaacaagcttgatcacacaagcaccaaacccgcgaaactatgtcgcataaaaccgtgaaactatgtcgcacacacccttagaaagctctcaatgatttgtctttatgtctcagctctcctgcctctccaagacgtcctacctcctccttatgtagccaaaacgatttcctaatcaccataggagaagatttcctttttccataagaaaaagtaaatttactcttatcctttttctcatcaaactccactttcatcaagtcttccaaatctctttaagtcctttttcttttttgattcatcctctaaacacgctcttctcaaatcttctagaaaccgatactcacacaaaactgtcgcatcctgaattatttcttgaatcattcagcaattttatcagataaaatcatgtattacttcttgtatcattcaacactttcatcagcagcagctacatcttcaacttagtcctgtaatttattttcttaacatacaattgaattcagctaatcgtccttgcgaatgatcaaatgcatagataattgtatcatcctaaataaaagacgtggggaaatcatatgacatctagaactttggagaagggggagataagtgatgatgcatggaagcatttcccaaagataatcgaatagattctctcttttcttttgtgttcgtcagtttttctttaccattccccgagacaatatggtgggtttattaattattttgattcttctataattcttcccattatttttatatattctttttaagttacccattcttttttcttcaatgtcgagacgtcgagttagttagcttttacggcgacttatggataaggcattacgctcggagccatggactgagttggatagatataatgcgtataatatttaatccccataacctatattttaattcctatacattgtaatggtagcatctcaactttaaggttagagttggaaccttaaagtttatgaatattacaaaacacttgtatgggggtggagtgcatgaaaattagagctgggatgtatatatgggaatatatatgcactacattatcttacattttacattgaaaaaatattagaagatattgttcttcatttatttaagtatatttttactgctggtgtattctactgccctatatatatctcgaaagttaaataaattcatatgttatataacttttagtcattcgtggcattcttctgttacatcttactgtggatttttcgtcttattatcttatagctgactcttactttagagagacaagtataccacaatggaaagggtgatttgacggtaaaaaaagcgattgcagtgtacccacaaacgacaatttataatttgtatgtgggatatatagtaagggaaataaaaatcatagggttaaatagaaaaagtgaatgaaactgtcttgtagttgtagtagacgaatcaaaaggacacgtagatggtcaagatacgaacctcaaagccttttccctcccatttaatgattcttgtttttgttttaatctataatttttcatgattttcttaagtctttgttttgaaaatcacgaacgaataagttctgatggatgtacttgaatattagtaacaagactaattgaattaaagaaaagagaagttattcctttgacgtttataattttccgcggctaagggaacatatacgttccttgaaactgttgccatgcaacttttgctttaacagtttagagagttttttacttcatgctacatcctttttctcctgacacacacaagagcatattatacatccatgtacctcctccatcgaccatcaatatatagatacatgtgattattaattatctacataaaaagttataccacgaagttgcgattgataatatgaaagtggtacatgctcgaaatagataatgagaatatatcagctttagttgtctcatcgttagtcaatctatatgtgcatatacagttaacaagaaatctataagcatatacgaactggggtcccaataaggtctaagaatcttttttttctttttttcttttctttgctttgctttagtttagtttgtgaaatttagtgaaaatttcattttgtctcatagagaaaccacatgttagtcaaaaattatatagtaagtccaagaaaactatattaatatacccatattaccatatagtcggagatttctagtatctctagtttagttcttcttattcattatcaattcaagtgttataaaacctcgagaccaataaaataggattcactctccttcgtgcccccaaagatataggtttacatatctatatttccacaccaccattttaaaagcaagagttaattaaagagatattttttagtcatcttggtatgtaatctggtaaactttttagtttgttatcttgtataaacaaccagtaagattttggttcttttgtaaatacttctctttgaatttaggactagtgttttaaaattactttcctcccatatttttgttttgatctttcaatttaaattaaaagttcgtttacaacccatgcatgcacacttccgaatttaaactcggattataatttggcactataataatctattagaatacgtcttgattaattttaaaatatttaggtgtcttaaaataagtacgtacgttgataaatatggagatatatacatctgtcaagtaaatggtattgaatttgccagtattagcttttgtgaagctgacgcaaaatgaaaacggctgatatctaaagctttaaccttgtgtttcttttttttgtttaaaatagtggggtctagaaatgataaattaatttaaagtcctcgatatatataaatagataaatttgtttcttttgggaataacgtagtttacggagaaacccaaatgttaaagggaaatgcattaaagctgtagcaaaataagaaagtaaaaaccaattgaaaccctaatttcacttcaaaaaatgttcccggttgttaaaggaagggccttttgctttgtccatataaatatattgtgagagtacaacaacaccttcataagctcttacactcatttcaactctctttttcgtttccattaccctcaggtaatcataacatatatataagttacatttgtagatacatatgtctttagttttgtgtaatttgttacttaattattattttctatggtgttgtagaagaagatgaataggccgggagattggaactgcagattgtgtagccacctcaacttccagaggagggattcatgccaacgttgtagagagcctagaccgggcgggatcagtaccgatttactcagcggttttggtggccgtccggttagtagctccttcggtttcaacaccgggcccgatgtgcgacccggggattggtattgcaaccttggggattgtgggacacataattttgccaataggtccagttgtttcaagtgtggtgccgcaaaagatgagttttcatgctcaagtgctgctgcaacaaccgggtttatggacatgaatgttggtccgagacgtggcctttttggttttggcggcagcagtagtggtggtggtggtacgggccgttctccttggaaatctggagattggatttgcccaaggtacttttttgtttgattgtttctatgtattgatgttatttttttgcaataatatgttttgatggttaaaacttaaagccaaaaaagaaacatgcatgctggcttacgtaagctaaacacgaccgtttaaattgtattaatgtatatgcatatcgtagaaactgattggtttaatttgtatattataggtcaggctgtaacgaacataacttcgcaagcaggtcagagtgtttcaggtgtaacgcaccaaaggaacttgccaccgaaccaccctattagtcatttagtcctcctaccttcttcatcatttccaagtacttttcgtttcaacaatagtcttaacttctgatcagaaacagttcgacatatatatttggatgatagaatttgttaacatttacaactttattatatcgtaaaagtttaaatagtagtgtgaaatacactaacgatagtactttaacgttaacgtacgtatctttttgattattttttttagtactctggaagcattagaggagagcagaaaggtgaagaatcgaagcaagataccgaccgcccttaatctcttgatttgtttaatttcttagatttgactcgttttatatctcgtagtagtcagacctatgttagaatgtaagcatgtcgagagttttccgaagcattttgttctgatatcggtctcctagctagtatgtaagtttgtttgaatgtattcttatttctgataaagttgtttccttctgattccgcaatcacgattctcatctaagtttgaaacacttgagttgttgaacgtacgagaggctgagagctgttgagaacttcttctgtggccgcaaatccaaattgcatgcaaatgttattatatatgcaattaaaattttgttatataatttgtagtaggaatgtagttttacgttaaaccaaacacaaactctagtaaccgtttgaaatgggtagatgcatggaccacaacgaaaccttttgtccaatgcctcaaaaaaaaatatgcatgagcattcatattatgatgtggcttggtgataatgagcttaccaccaaatcgaatgaaaatgtatgagttccactctaaaatgagaatagttatcagaaaatattaattatgttatatatcattaattagtttagaattctaatttattttcttggtaacattaagttgcaaaattaattttaattaaatacaaatacggatttcactatatattaaattgcgtattcaaggccatcttttcgcacatacattcgagcagtcgaacaaaacccataagaagatttttgcaatgaagttttgtcataaacaacaatattgcaactgatcgatgaccgtttccttaattgtttgtaatgggtggtatacttaaaaatttgttttcaaaatgtaagtaagaaagaaaaaaatcagtaacgcatttttcatatttaccattcaacttttgatcctgcttatttttgtactgtttgttccgtctcgcagtactaattagaactacactttttttggtcaaaacactaactacattttttttgcttgatctactactcaatatatttttgtttttatcgctcgttctatactgccacgtacgattgagactctaaaatagagcaagcgtacgttggtacgtgtccacacacacgttgcattttgcataggattccaatttactgaactcatggaagtgtagttaagattatcatcaacgggtcaaaaaaaaaaaagacaaccagtctttaatgtctgctactataatccattgcttagcttttattttttcgttaaagggttgcactaattggctttttactaaagaatctttcgtttttcccccactttgaagtcaattcatcatttgattcttctttggttttagtgaagtgaaagtacgtcttaggtatgattatcatgcatgcatcatagtgaacgtcttcccactttgaatttcaaaactatcaattattagattcgatttagatatgaatatataataatagtatttcaaaatgcataaattaggttgtgaattgtagacgataaaatacaaccagcttagtaatcttcttctaattatcaaatatatagcataattcctaaatcatatgtttattctcattaactaacatagtaggtaattctgttcatatgatttagctaaatgcacggtttcataatcacctaaagatccataagcaatcatcaaattacaattagtgtcaaactaagcactacttaaaattcagtgttggcggagaataatataagacacatctaattacaatggtaaggatagatgtgtgcaacagtgcaagtatatgtatagctttaatcataacttattagtgtttcttttaatgagcaaatgagagagacttgtcgatgaccaatctaagtaaagtgtacatcacttgttaaataaacaaatatattcttactgttaaagtcaatttttataacaaaagcaatagcaaagataactttttatccatttcaaaaacacccttacacaacgctaataaattcttaaattttgggaaaaattgcggtaacttttataaaagttttaaaatttatctttaacccacataaaaaagcaaagcatgttcatctttctaagccctttttttcttagcccttctttcttttgtttcacatttccacattcttcctaataatttctatctttatgcaaagcacacaattgacatggatggagcatatgcatatgtatttgatgaaaacttattttctggtacagtataattccaccagaaaattgaagcctccacacgaatattgtttttttttttttcttttttttttacaagatgtgatatacataatgatttaaatttgattggtgacacgttaacgacactaagacagattgtgagtttccacgtgagtttgttatcaaagtatttgtttaacatttgaggactcaagattcatattctaacattatcaaatactattttcttacataaaatgaaaatatcacctattgttcaattaggaaaaaaaaattgaaggaaaaagaagataatttaaaatacttttaagttggaatgcatgtagattaagattattaaaaaattagaaaatggcaaaaatatttaaccaataaacggtggttcagtgattcaaaagttattctaagatggtacgaaatagagttcacattttgtcatttgttttctatcattgttggtaatatcgtgggcattttaacatgtactaggtataatattgcaaaataaaacaaaactgtgcaagatttggcgacacaatccatcatgattccgatggttccactctgagattgttcatggattagttcgaagagtcgatctcacatgacacgcgtggaatcagtgatccaaggttttgtgttctgcattgttgatagcttagtttcttcggaccccaagtaaaacacttccactgctaagaatgtgtttcatttgtctttacattttgcatcatcgtttttcgttctcaatagctcaatgcagtgatcttcaaaatcattttcacttctttagacaccgataatttcattgctttcgtcgagtcgatgaactgatttgagtttgtgattttgcttcatgcttttattttattttactatgagaccaaaaataaagtttaaaatcttgatcgtaaacaaaacattttcattgaatcatttttctgggccaaaagaggcctttttaatggcccattaatgatccaaacgcgattaccaagctcttcgcttccaactacatctcctctctcacagcttcacttcacttgtgtcatctaaagcttcccttgaatctcttctctcaaattcgctttacttcttttcgcgatacagattcacttgcattaaaatctgttttctcggagagattcttcccgtggatgagataagagatcccaatttcgccgtttcttcattcacaagagttgcatacaaactgtttgatgaaattcctaagagaggatctgattattaggtcgttgctatttcactaagctgattttcaaatgtgggttaatgggtatcatcaaataagaatacatctaaactctgaactcagtttcaaggcaaatccaagtcgcttcttccgttcattccaggttttgtatcatccttcagttgattcatatgaagatgtattgcctcatgaatggtacgaaacgaaactcccagttctgaagaaactaaaccgtgcgttgagagatgttgatttagtcgacggaaagctagaggacatcaatggtgtcatcgtttatgatgatggtatcacaaagaaaatgcaagcatttaaatctctagctagaatctttattgggtctccttcaattcagcagaagcttagagaagagggacggttcaagttcccattttttgggagtgaaagtgaaagagagccattggtggtgaattcattgactaaagtttgcaactttctcaacgtctcggcgcaacagaggaagctagtgaggagcactgtgtgttcacaggtaacgcagtatcgtatatggagaggtactcttgaagatatattgaatggtcttaaagaagaagttgattggttagttgaacatagagagatgagtcaaggtagagtattggctcagcaagtgatattgtcttgcctcagattcttatctgaatcatcagtttcatttgaagtcgagaaatcaacttcttggatgcggcctgtgccagctagatatgcgaaagctaatgcttctgcgaaatgggaagatgtacttgatatggtgaatgatctgagaaggtatcttgaacatgatgaagaaatcacagtactttaccatctggataagcttgtatcgatgaaagaagggcttttgcagatcaaagatgtgtttttagacaacactattggattcagagaggttagacatcaagagcaccttgtgtacagaaagctctcaaagctgttgggcagtccatcaccgtgtttgtttgctctcgtcatgtatttcctctatggccgtgtgcgtgacatcgaagttgatctctgtggagggttttacaaggagaagagcgagttcttgtgcttaagtatggggaggatcttgacttcaacggatgagaaaatgttggagagagggatgaagcagttagatagggcattgggtctctttgagtttgtgtgggaaacagcaggaatgaaagagactcttaacctacaaggccatttgtggtgccttggagctgaagaaagatccatcacatatcgtgggaagacgttcttcgtgcatgaccttagtctctgaagttttgtgaggtacaagcaactacctgtaaactttgatgtgttcccataaaccttttgatgtttgttgttgtttagagccatagttgaaagaaaaaggatatataaacttaattgattgatacaaagagtttgataaaaatctgcagcatggtttcattgctttaaaagaaagcaatagaattagcattaaaacccacacagctaacaacatcaaagttatataatattacagagatcaacctcgatgaaaagttcccaagactatagcttaagcaacagccactccatcatcttctcgatgttgttgctttggataaactgtctgtgaattggtttaaacgctatttagcaggcgatggaggttgctcgaggagttaccagaacagcagtctttcctgttatcggcttcatacttgctgcattctctagccttgcccatacttctttcctcttttccgcagcagaacattgctttgcttcgtcctccttaaagcgggcgtggcaagacatgaacagagcctcgtccatttcgcagaacatttttcgtacgtttaaggttaagtttagcacggattggttccagtggttctgagcattcttttctaaagcagtgaacatgattggtaggatggcttgccggttatgtccaatcaagtttacaatttgatcgttgttccacaagaataaagctctttcagaaacctgaaacacaagaagaccaattggttcaaacttagcttatcttagactcatgcagatcaatcatatatgagaactatgtatgaataggaatgtacctgaaagtgggaactggtgacacaacaagcaatccgcaagaacaaagggaccatgatcttttgaaactccatcacactcattgcttctacaatttcttcgacctccccgagaaacatcacttccttctgactattcgtgataggccagaacttcaacaaaccctttatcacaacactgcctagtttcggctctttatctatgaactgagtgatacaataagaaagctgctgaaagtagtttccaacagatttaggcttgtgcaatggaatcaacactctccacaagaagatcttatgctcttctttcaaaggcaacgcaaatccactcactatactcccgaaaatctccaaaagctcagcgattccgctatgcttctctgtctcaaacacaaaccggtagaatatattgctcatggacttgcgtacaaatggcctatgaaccatgaacttcccatatacccgatgcagaatcgtcttcaaacactcccgttctctaggatcctccgaatcaaacaagtcaagcaacctcacaatgaaagcatgatctaaatacttttttgccactttagcatcaagacacggagaagtgataaacttaagcaacaaatcatacacaatctgcaaatgaggccaagcagggtcaaacatcggttcatcatcatcgttttcgccaccagaactagaccgataattcggaggaaagaccctaaagagattaacagcacacattctacacattgcaagaatagctggctcagtgaacttaacagaccctgaagctacaaaatccaaaagctccaacaatgtctgccttttaacatctttctctatagagtttttaccagggtcagagaaatcaaatgtcacacaacagagactaactttactcacaaagagattcaacttctcagagcttggtacatccttaaacggtaccaaaggctcaataccagcaacaacactagctgggaacacagcagatgacatacgcttccctgagttagatcgaaccggacccgaaccaccaccactagtaccggatctctgaaccggagacgataccggacccgaactcgaacgattcagctctcctgaatcagattttgaagacttcctcggaagtttactcagaaactgcttaaacattctctctttcccaaaaatttcaaaactttcacaaattgggaatcaaagaagctcaaatccacatattagccctaaattctccgacaaagaacatggatctgacattaaaaaaaaacagagaaacgtgtaatgtgggtttagatccgaagaagaagcagagaaaaaaaaaaggttgacacttttataatacccaatacttgaaaaccctaatcattaccttgctttctccttcaaaatcttattctcatgattccagtatccacgaacaaaaacattcctagagagagagagagagagaaaaaaaaaactgaagctagagagtttttcaaaaaaagaaaccaaatctggaagaggaagaacaaaaaacagagtttggattttgagaaattttatgattcgttacggtgttttcttcattgtttttttttagatttctgagaaagaagaaatttgcaggaaaattattttaactttcctaattttaattttgtttttttcctttttgtctcgaaaagacagcgttttcgtttcagttttatttccgataatataaaaattagaaaacatctcgcatgcaaattattaacgtccgtttgatgagacgttgacacgtaaatccaaccgttggatttgtctgagagaggaatcctaagtaatttggttcgctaaggcccatttattattatgagcctattattaaagcccatttatgattttggccttatcacaattcacaagagtatcctccactaatctctagaagaaactgttttcgtcaccgaaccagctgaaatctttttcgcaacaaaacaaactctatccccaaattcagaagctttttagggtttcttcttcctttcgcacatatcttctccgattgattttgcagtgaaattgtgtatctttttgttgttaatcaggtaaacttttcatggtcgccatgtttattttttcgctagatcgagctttttttcttcagtcaatttcggattttatttggtttatgttggtgtatattttttgatttggttgttgttgaatcttcttagaaatgggttttgtttaattttgaattttgattttgtttttcccctaatcggaaatgatgaaaatggagatgtgtgttgatcggagtatgttataggattgaatcaaagtttctgttttttttttctcagagctgttgaagtgaatgtttggatatagctgtggtggtttcgtatcatgtccagtaatatgggaacagagcttattgatctggagactgtgaaagcggattcagatgcttttggagaaacgaatttgatggagttagttggatcaaatgatcctccttctcttcagcatatctcagtttcagagattgagcaagagcctatggaaatatctgtctctggtcctttgtcattccaatttgagccagaggctgtctcttttcaatcatctatgttggttgatactcagtctttgatgcctcagttgcaacttccatattctgtagagaggtcagtagctgcatgtagtaactcagtgacagggaagcggaaatcgccaccagagtctactctcagtggttctgctacttccgagaagttagatgcatctaacaagcgagtagagccagtgcaccacagaccatggctagaacaattttattcagaatgtattcagcggggtcatatgccaccacctgctactctttctaccaagacagaacatctaccaacgcctgctaagaaagtaaggcaaatggaacctgcttcccaaaaatctgggaagcaagtgatgaacaagaaacaagcaggcttgtcacaagggtcggtgaaaacactgaatgatggtaacgagtctttgaggtctaaaatgaaggaatcattagcagctgccttggctttggttcacgagcatgaggagtctccgaaagagaaaaagaattcagaaactgaagaagcaagtgttccagtagctgatagtaatgagcctgcgtcagcctgtggtaccagtgttacagtaggtgaagacatcacgccagcaatgtccacaagggatgaaagttttgagcagaagaacggcaatggaagaactttgtcgcaagagagttccaaggacaccaagatgaattatgttaatcaatctgatgtacagaaaactcaatttgacgaggttttcccctgtgatgatgttcgttttagtgatagtatttttactggcgatgaacttttacagggtaatggcctctcatgggttttggaacctgtttcagattttggggagaatgaaactcaaaagtcgtttgaggatccagagctcttggcatctaaaattgagttggaactttttaagctatttggaggtgtgaacaagaagtacaaagagaagggaaggtctctcttattcaatttgaaggataagaacaatcctgagctaagagaaagtgtcatgtccggaaagatatctccagagagattatgtaatatgacagctgaggaacttgcttctaaggagctttctcagtggcgacaagcaaaagcagaagagatggcggagatggttgtcctacgggacacagacattgatgtcagaaatctggtgaggaaaacgcataaaggtgagttccaggtagaaattgatcccgttgacagtgggacagtggatgtctctgctgagattacatcaaatagtaaacctcgagccaaagcaaaatcctcgaaatcatctaccaaagccactttaaagaaaaatgactctaatgataagaacataaaatccaaccagggaacatcatctgctgtgactctgcccccaacagaggagattgatccgatgcaaggtctgtcaatggatgatgagatgaaggatgtgggatttcttcctccaattgtatcccttgatgagttcatggaatccctgaactcagaacctccatttggcagtccacatgaacatcctcctggaaaggaagatcctgcatctgagaagagtgactctaaagatgggtcacattcaaaatcaccttcaagatctcctaagcagtctccaaaggaaccgagtgagagcgtctcttctaaaacagaactcgaaaagactaatgtaatttccccaaaacctgatgctggtgaccaactcgacggtgatgtctccaaacctgaaaatacatctttggttgatagcattaaagaggatcgaatatgggatggtatattgcagcttagttccgcttcagttgtctcagtcactggaattttcaagaggcaagtctctttcattactttaaactcttatctcgtattttggagtggaacatagtgataacaaaccatgatagaaatgggttattagtaccaaagatatgcatgaagctaagtttagatgcttgtttaataggaaatagtcagactgatgcttgtttaatttgttgaagaacagatggaaggagaaaaagatcttagacataaatgttttaggtatctctgatttatagattatctctaactggaattgctcgtgcagtggtgagaaagcaaagacaagcgagtggccaacaatggtggaggtaaagggtagagtgagactcagtgcgtttgggaagtttgtaaaagagcttccgttgtctcgaagccgtgtcttaatggtatacaaagtttattacgtgcattatctttgtagtagcattattagcattagcttcactctcttccctgttactataacgagcaataatactagatccacaaaatctcatctcaatattacaagtcgtttcttaatgcagagactaggcttctcattagctaaaacatggaacccagaaagcaaaaaagctcactgttgatctacatctgtgaaacaggaccggggcagtaataaaaaaaaggcctgattgaccagagaatcaatcaactgtggattgaatctgaaattttgtacaaaatcatgaaattttgtatgccaaatcacttgtagatgtattgttaactaggtaggatatagaatcatcaaaaatgttaccaagaatctcttacagagagagagttacaagaccacaaacaccagaacttggtccattaacttacgtgcagatcatgattcatgacccaaaatagaatctttcgaaacatataactttgtcttataggaaaaagtttctacttttatgcatttttcgtaagtagtgtaagtaattaagttggtacatcaaattgcaggtaatgaacgtggtttgcaagaatggtatctctcagagccaacgtgatagcctaattgaggtattaattctaattctgatttcattattattcttttaatttttattgcataagacatttattagttttgctttaaagtctttgcctttgtcctttttcttgagtcaggttgctaagtcatacgtagctgaccaaagagttggttacgcagaaccaacctcgggcgttgagctttacctctgtccaacactgggtgaaaccttggatttgttgagcaaaatcatctccaaggattatcttgatgaggtcaagtgttcagaagatatcgggttgattggtgttgttgtgtggaggcgtgcagttgtcgcgtctcctggctcacgccataagccgggattcaaacgtcagcattcttctacaggcactaagaggtctgtattggctccagaaaaccaaaagtctagaagtgtgagtgttacgaatccttctgttgtaaatgttgaatccatgaggaatcatggtttggttggttgtgatgatgatgatgaagacatgcctcctggatttggtcctgtagctgcgaaagatgacgatgatttaccggaatttaactttaattcctccagtggaccggttacttcttctcctcgaccaccgttgcagtcccggtctttggatcaagtaagggagctcatactcaagtatggaaattcaacaggtagtggtagtaaacgaccatgggatggtcatgatgatgatgatgacgacgacattcctgaatggcaaccgcaactgccaccaccacctcctgacttgagtcctcaatttcatagcggaaccatggccagaccaccagcacaacgacctgttgcgggaccaccgagtggatggaaggccaatcaaaacgcacctaggcaacaacagtacagtgcacgtaggaacagaggattttgatctttgtgaatacgtttgtgtaattaaagtttgttaggtctattgacgtctctatcatcggcttttaagtgtttctatagaattgtaaacctttgaataatggagtcttttaagcataaaagtttgaactcaacacaatcaaggatttgtacagattacaggaagaaagatctcggttcttcaacccgctaagacccgcttgagagcggatttctgctccgttgtcaatcttgcgggaaactgaacatcgaacttaatcttaagatcacctttgtttcttggttctttagctattggcatcccttctccaggaaccacaaactcatacccgggactcacgatttccgcgacaccaacgggtagattccgcccatcgagggtgttgatattcacagttgttcctcctatagcttctgcaagcgttactcttctgcttgtgatgagatcattcccatctctcgtgaacaaatcatgtggtttctcgtctattacaaacaccaaatcagctggtaactgattcacttgctcatttcctttgtctggaaactttatctttgtcccttttttccatcctggtttcacaacaatcgtcaaaatctctgtctcttgcgcttgtctcctgcaccatccaaagaaacttgagaaacaagtctaaaaagattaaaaaatacaaacaaagtaaagactatagagaaagttgttacccattagcatcaacaatggatctagagatcttcattttcctagttgatccagaatacaactcttcaaggctacaaggcaatttactctcaaccggtggaggtttcttaggcgcaggagtgccttcactgtaagttctgaatatattgttttcgctaccgttgtttccaccaccaaacccgccaaacattcctcctccaccgtctgattgaaacctcattgaccttccaggaccaccagctgaaccaaatccaaatggactacttccaaagaactctgcaaatatatcttccgcatttctagggttaaaacctcccgctcttccattgtttcccgtgctcccgggaggtggcatatcgcttaatccttcttccccgtattgatcatacaccgctcgcttctgcggatcactcaaaacctgaaacattacctcatattcttagcaatgcagcaacattacctcatatgcttgaggagatacattttgttttgcttatatcccaagaaaacaaactcatttacatataactttgaattattagctaaagcaatggatctaagggaacaagggaataaaaattagcaaccaaaataaagactcgcctcataagcctcagagatttgcttaaacttggcttcagcttctgttttggtgttagggtttttgtcaggatgccatttcatagccaattttctgtaagatttctttagatcatcctctgttgcgttcctattcactttcaatatatcgtaataatccaaacccatcttttttttgctctcgttttatataatttaatcttctcttctaaaacaaataaagaatcagatctttaaaatctcgaatatatgacaaaaaaaatgaagaagaaaaaacttcttgttctgtagaaagaggacaaacaaaaagatcaccgacttgttttttttttgtttttgtttcctttctttctattggaacagattgtttttaataatttactctaaaatcattatatgacagcttttgcaggtttaaacacacagaaattcacggaatctattttcctcatttttcgcctctgttcaaggacttatttagttgattctaataatagtacccagagagagacatatgagcgcaaaagtacctgcatatagatttatggcatttataattttacataccggtagacaaaataggtccaaactgtgtttagattccatctttttacattgacattaactacaattattttggttgactaacgtaagtttcggtcataattagcatttaaataaggaatgaaacatagcaacatatcattgatacggtaatagataagagagattcatattaatatcgagcaccaagagcagaggttgtaattcatagcttttctcaaaaccacaaaagaaaattcccaaattctcaaactgaaatctttcttaaaaactatacattgtactctcttttcccagagacaaagtggggaaaatgtagaaagagatctcctaacaatatatcatgaacttcatatcatccatttgcaaaagaaacttaagaagaaaaaaacttcacatttttttaaggactgatcaaatcaggaggaggatacgttagcgttgcggatacccgaagatgacgatgcactactcccatcattcttttgtttcgaagactctgtgatgatctcaggtacatcaccaatgtccagtgtgtctggaaggtattcctcagcttcagtactgtaaatctgtagaaaagaaacaccaaacgtcattactatgcttaatgcaggaagactgaagaatgaattacctcgagttgattcagcatttcgatagttgcatcaagatcacaagtgttagccaagtaaacatcattgatagactcttgtgaaagaccagggtatgtagctaatagatactcaatatccatgtccatctccaaatcctcatccttcagctgatgattgtataccatctcagatggtgacttcttaggtgacatttgagttccttgataacttcccattccttgaactccatacccataataaggttgttgctggtggtgctgctgctgcatgtgttgttgtgtgacaggctttgtatcaaccaaagaaccttctcttttcgagagtggtacataagctgctgcgtaaggattcaatgtagaacttcctgacttcattgctaagtgacacaatccaacaaacgaaagaagagttcaaatcggtgactacaaatcagatccctaattgttcaaaaattgattccaataagaagaaacgtgaccttaacctaactaatcaaaattgatgccacaaactcgatgacctaattcttcgtgatgcttttaggtacagatcaaaatcaatcaacgcaatctttaacagaaacgaacaacgaaaccctaaggaatcgattctaagattctaaaagcttcataaacatagttgaatcatgaatctaacggagatagtagataaacatgaatcatgaatctaacggagatagtttcttctcccatgatcgaccaatcaaagcacgattcgcgtatcaaatcaacatagatcgaagaaatcaacagatagaatcgaaagaaacggattcaaaacggaagaacaaaaggcgagatgattgcgattacgtcaacgatcgtcgtaagacgcttaccttagagaagaaaatccaaaagcgtcgttgaagaagaagaagacaatggtgaatatttgcagagagagagagatctaagaaacgctgaaaaagtggggagaggaaagaaaacgactcttttgatcaataatggacttttatatgcaacaaagaagaagaagcgtttacttgaaggtcgtatcattttaggggtctgtttggaaacgtgaattatcttatccctaacctggttattgttatcctaatattcgttttctttataaaaaaaaatctttgatatttttacctggtatgctgacgtgtcttttacaaagtggctacctcttcgttcctaaatttatctctacatttgaaaaatgcgtgactaaacgagatgaaagtgattttttcttatgtcctactaatcatgattatataatttgttaatgtattatttaaaatactaaatcaattagattttctataaccaagaaaaaagaattaggtcaatggaatctgcccaacctaatcacggacgatgttttggttaaacatatcgttaagatttggatgaatcttttatgtcatgtatggccggttccaagtgtgactacaggatttgggcaaattaacaaacacatttataaaacatttataacataatttagattaaacacacaatttaaaaatcaagtcttagttttattgtttggttttgaatctatatatcttaaggtcgattaatggtttcgtagtgcttcaatatgttatatatggtggtgctcctcttttgtaagttatgatcatcagatttggtttagtagacatttcggttaacttaatattaaggttcacaacaaacaaacaaacccccctaaaaactagcatcatcacatactgttttatgagcatcatcatctcagacgctaaagtagtgggacaaattcatttcaaatttgccaagtcaattcaaaataaattataccaaaaatcttaatttacgctaaactagtgggtctttttctccctaaaactaaacgtgttatttacttattcatcgtctcattgtaatagaattgaaaatgaccaagagaaaacattagtttttagacattctcggtcaaagccaatactgtaatgaaaaaacaaacagtttcacataaatctactaaaaatagcgttacaatttttttactctacactcacatctaataataagaatcactacctttcactgctaatctctctctctttacaaatccaaatcttaaagaaaaccaaaaaaataataaagaagaagaagaagaagaaggagagtgattaacaaaaacataaaactccattagagtgtgatgaggatttatcaaccaaccttattaatattcaccaccgtcgtcttactctccatctccgccgtcgctcctggtggctcccggcaacttttgtacacccgagacgaccctataaccatacctccgtacctaatattcgaaaacgtacggctcgaaagagcttacgtggcgttacaagcgtggaaacgtgccatgatctctgacccgtggaatctgacaactaactggtttggatcacgtgtgtgcgactacaacggtgtagtatgctccgaatctctcgacgaccctttggttaaaactgtctccggtgttgatctaaaccagggagatatcgctggtcatctccctgaagagcttggcctcttaaccgatattgctctgtttcacgttaactcaaaccggttctgtggtacactcccggtcgggttttcgcagttgagtctccttttcgaacttgatcttagtaataaccggttcgctggtaaattcccggaagtggtaatcggtttaccgaaattaaagtatcttgatctccggtacaacgagtttgaaggtgaattaccagaatctttgttcgataaagatcttgacgctttattcctgaatagtaaccggtttagaagtaaaatcccggttaacatgggaaattcaccggtatcggttctagttctagcctcaaaccggtttgaaggatgtataccgccgagtttcggtaaaatgggtaagactctaaacgagatcattcttatggataacggtttacaatcttgtatacctaatgacatgggattacttcaaaacgttacggttttggacattagttataactggttggtcggagagttacctaagtcgatgggtcagatggagaatcttgaggtgttgaacgttgaacgtaacatgctctccggtttaataccggatgagctatgttcgcttgagaagctaagagattttagatacgggtctaactatttcaccggagaaccagccacgtgtcgctatctagagaattataattatacgatgaattgcttcaaggacgtgagggaccaaagatcgatgatggagtgtaagatgtttttgtcgaaacctgtagattgtgactctttcaagtgtagtcctggctcttcgtgtttttctcctcctccgagtcaaatatcaccatcttcgcaaccattggcaccggcgccatctcctacttcaccaccattgtcaacaccgcctccggctagaccatgtccgccggtatactcaccacctccaccaccaccattgtcactggcgccgtctatgaactgatctatctatttgacatttgtagaaaaactagaaagcgcatgtttagatgttgaaagtaaaagccagatgagatatatctacggtgtttgtagtgggaaccaaatgaggttacaagtggaggagacaacaagctgaaaatctttaggacaccgagtgtataaggacttgtctcttttttatagattgcatgcatgtgcgtgtgtttaattttaacttgatataattttttgagtccatatttcttgttgagtgtttttcagtttcattaataagaaccaggttagcaacctctttaaccaaaaaaaagagtaaaggttaggaaccatttgacggcacggatcaacgggttagttttggatcctatgactatgaatgtgggtgaccacctaataaagtgtggtgcatgcagtatcgacttttttgtcacaattaagaccatatatcgaaatgtacgaatgtttttgcaaagtcacatatttttgaaatatgtacgcgggatatatggagtatatatatataatatgtgcctttaaaatgcatatcaatagtggttaaatggattttagagtcaatttttgtagtactttgataaaatttgtattctgaaaggattgaaataaaagtttttagctggtgtatgtctacatcactattgaaataaaacagccgttacaaaacgtggcctaacagccgttatcgttggtttaaggacgaaaatagttgttagttacgctgttaggagagctgttaagaagtattaacggtgagtcgatttggccggatcaactataacttataagttaaattaaaagtcaactttttactaaggtataaaacggtcatttcaaaagttcacggttaatttggcaactttttgaaaattcagttattaaataacattttttctcttataaattagagagatttccaatcatttaagttgccaggtcacacccacccgtgtctcttaatcaagtccaacacgtaaaatcttttcgatatttatttgcgctttgaaggtcaaacaaatttaattgtatgattgagaattaggtaactaaataagacattcatgtaatggcatcaaatatttatgatctcagacattttggaaagtttgaaattctttggtgacatctggtcttatagatattttgctgtcaacttagggcctgactggtttaaacgcagcgggtgcggttgcggttgcggaagtttgcggaaacgggcggttgcggtttcaagcgttatcaagtgttttgaacgactggttgagcgtttggtaatgggtgcgtttgcgggagttttatgactggtaaaccagcgggtgcgatagtaattaaataaaaaataaccaaaataaatataatatattactattaaaaaaaaaaatacaatatattattatgataaattgataatatttgaaaaattaaacatacttaataattaaaaccataaataaaactgaaaattcaaaaataaataaattttataagaaaaagcttaatactttatgcatttggtacatcaccaaaattgcatcaagtagtgtgataaactgtaaataacgttgaactcgcgggttttccggattgcctctatacatatgataaagtttcttcaagatatccaaacgatttttaacacatctccaactcaaattttttccaaacgttaatattcttaagaatattttctttttgaacatcacttagaaatctgattttggggtctttggattcttccgtttatttctccacaataacctgttgcagtaacgcaaatgtggtctcgtttgaccaaatgattttctaatcgagaaaacaaatcaaaacatgtattcaatcaaaaaactcaaaaaaaaacaaaaaaaaaataaacaacaatgccatgaaatattccgagaattacactagctaatgaatggatgaaaggatagatcatacttacgtttgattcttgattttgactttgatttttgtcagtttgggtggatgccataattgagagaatagggtttcattgattagggttttctgataagaataagtatagggtttgggtggaagatataattattttaattaattaatttttttttttaacctaaccgctaccgtccgcaaccgcaaatacttgcgggaaggagcttttgaaatctggcaatttcgaacggtatctagcggtttctatgattggtgccaaccgctaataaccgctaccatctgcaaacgctgcgtttgcaggtggcagaaggagaaccaatcaagcccttaaaacatatagatttggttgacgtttcttaacccaaagaaacaatcaaaattcgaagtatgtggaaacatttcctttataagaaacccacacgcatttttttttacttatataaatctcctcacctgcaagagaaaaaaaaaactttcattttattcgtcgtcagtttcatcttgttgcttcggagcgagcgagaattatcgtcggagaatttatcgtctctctctctgaaaattctgatcggtgaagaatcgtcggatcgaaagttcgtttatcttctcgtttacgtttccgtgatttaaatcctttggggtttttttttcttggtaatgtctgtgtttctgaatgtgtggttgatttttgttcgtacactttactttgatcgattaggtttatgtatagttaattgaaattttttggaagatttcagaagaagaagagaagaaacaatccgtaatctagacccttgaattgacctaataataggatacatatgatgactatgaagcagtctttgagtggcagggttcttaggggggtctttggtatctatctgtaggagggcttttaggtgctgtttcgggagattaaagccagattcaaggtgagtctgagagcttggttcttgtatcttcttgtttaccaatgggaatctaggtcactgagaaaccatccttcttgttgatctagtggaaaaaatcgattatttttctatcccaagtagttgctttttctttcttaaccttaacttgtgcaatcttcattctacctaagcatttccccttgataatgaaactctttaatcatctctgatttggccaagagtgttctttttttttgtcatctcatctatggtggattaacagaggttcctcttagttattcttcaagaaggcggcatgaatgctcactttgtttgtagtctgcttatctcagctatggtctccatagtgagtttcccttagagcatatctcgttgttgtccatgatgaagtttttgctccatgcggatcttgtgaacttgctagtagaatttttccgggtaacggcatcagaagatttttattccttcgattatggggttaccatttaggtcaagccaaaacaggtcagctttaaagatgggggtccattaactaggagtacccttcaagcctttgtttccttaaagaaatttctgattcgtatgttgactgaagagatctggtgcaaagtggcagtgggaggtaggtctatcctctttggacacttacccatctctttaaaacccggttatcccaagttttatgtcagtcccaaaccttgtttgatggtgtttgccttgcttttacgataggttggtcatatccggttgaaactggatagatttcccaagattgaaggactgaagtgaacactcaatgtgctaagcttttatttctctatgaaagctccatcaaccaagagggctgtttttagttgtttaacagggtatttgtagatcttcttgttttggtgattgttcctcttggagaaagctgattggagctgtttcaaaaatggattgtcttggtgtggtgcaatgtagatggaagcaacagttcatcgagtttttttgctggattttcaggtgactgataatgtttgcgaaatgaggaatagattttctaaatattttcttacttgcaggtttcataagctttccatcaactagcagtatctgccaatatcacagacagataattcgtaatgggagacgtatatttcaaccatttcgctcagcaactgcagatgtctgaccaagagaagggtgaaatgtcaagacattcacaccctcattcaatcaatgaagaatctgagtcgtcaactctggaaagggtagcagcagagtcattaacaaacaaagtccttgatagaggactaatggagtatgggtaggttttactccctatttgtatattcttagctttgagcttgtttcttggatgaatacccctatgttcttgcagatgtccacattacagaagaaggtgttgcattagagctccttgctgtaatgagatctttggttgccatcactgtcattatgaggcgaaggtagaggcttttttcaagttatagatttcaggaaactactttttgtaaccgctgttttcacaaaatctgtatacttactcttgcaatcatgtctttggagcagaacaacataaatgtagatcagaagcagaggcatgatattcctcgccaccaagttgaacaggtaaagtagtctatatatcttggtttctcggagttattattttatgttcaattcccagttgacaagacctctatcttcttcttcacaggttatttgtttactttgtggtactgaacaagaggtatgttttaactcttacactttctctggattttttctgcgtttagtaatcagacattttcttaactttgttggagatgtaactctgtattttctctggtaccaggtgggccaaatttgtatccactgtggagtgtgcatggggaagtacttctgtaaagtctgcaagctctacgatgatgatgtaagtctctgaggagaacttattgctaagcttgtttgttgtatccatatcctttttcttatgctatataccatgccctgagttttccaggcttttttttgttgttaatggttaaccattatgttgcttatcttgtttccagacgtctaaaaaacagtaccactgcgatgggtgtggaatttgcaggtacattcttggacttctctttaacatacaacatgtttgatttaatccacacgatatatatttgttcataactaaaatctctttttcgtttcagaatcggaggacgtgaaaatttctttcactgttacaagtgtggtaagccatttactgcatcagatttcagataacctcaaattttccgattgggcaccgctatatttgttgatttttacaatctaaccagctctctgattctcaaaccaggctgttgttattcaatcctcctcaagaacggtcacccttgtgtcgaaggagcaatgcatcacgactgccccatttgctttgaggtattacttattgttggtttttgttctacttctccactgtaaacatgagcgtccctttgttaacaaaaactgtcctggctggttttcttccagtttctgtttgaatcacggaacgatgtgacggttttaccatgtggacacacaattcatcagaagtgcttggaggaaatgagagatcattaccagtaagtacattataaaattcaggggcttgtgttccattttgaaatgttgttgtatatatcaactgacaactccaaactatgcctgcagatatgcgtgcccactttgctcaaaatctgtatgcgacatgtcaaaagtgtgggagaagtttgacatggagattgcggctacaccaatgccagaaccataccagaacagaatggtcagtatgagaacaaaacttacttagttacaccttatcccctaaccaagaactaaaagtctttttgacggtgacaaaaacaggttcagattctctgcaacgactgtgggaagaaagcagaggtacagtaccatgtggtggctcagaaatgcccaaactgcaaatcatacaacactcgccaaaccagaggctgaagctttttttgaagttgatttgctatcaaatgcaattaagagcttttcacttgatccaatagtgtcattggatccttaacttgaggactgggtctctcgagtctatctcttctcactctcttcttcaatattctctgagtcgtctcttgttcactagtctatatgtttccttggtgttgtttgatggtctggttagtttccattgtgattcatctcctttgtaattctgcggctttattgaaaagtttcgtttaatctgttaaaaaccctaaaaaatttgaacttgtatgaataaaaaattttagctgctcgcatatattaataggtttagagactcttattaaaggccaaaagcacacgtctcaaaaatatatccgtttcctcgcttagatacgaaacctctctctttttgaaatctctctgactctctctcggcgataatggcggaatcaccatcgcagagtgatgcacagcttgttgctcatcaatctcctggtcagcaagctgattcggatctgacgtctctcgtcttcggtttgttttttcctccttttcctctgatccttgttcatccaatttcgaatttcgactgacctagaaatcaggattaagcgtgagttcttcatgtttgtgaagtcaaatgctcttatgatttggtatttaacgagatttgtgcttacttaatggcttaatcgcttcatctaatcttgatttcgcttaaaaaactgtggaatcgagatgtgtattagaatccgccattgttcgttgcttctctcgcaaatagatctgtaggtgatacttagagtgaaagatgtgcattttcgttggttttatcaattttggtatctcagagttgctatattttgtcatccagattctgtatactctctatacactcttctttaaccttttggcttatgcaaattgaattagtaaaccttgttaaacgtttcatggattagatcaccagtgggtggattgagattacaagtcaatgttgtgtctatttcgcgaattctgtatgctctcgatacactatcctttaactctttggcttgttcaattgcatattagcaaacaccataactcgttttaaaggtttatcattatatgtttcatggattagaatcagttgatggattgagactacaagtcagtgttgtgtgtctacttctttagccatctcctgactgtgttgaaaacaaacgcaattgcagaaatgtcacagcaagttcagatggggatggagaatatgctcaagatggtttagtaagtattgtttatcttctgtttactacaacgaatgactatttctgctgagtgctgatccagtgccttccctgcagtgaaatcgatcaaaactcggttggaatcaaggaagagattgagaaatcaaaggattttgctatggagaagaaaaggatcctcgaggaagagaaagaccagtttcagaaagctgcttacactattctagacatgctaagcaacagccgaggctaaatccaagtactcgattttaaacctcttcacagcttcacttaaacaatgaaactgctaaattcattattacctgatccacttcctcatgtatcaggtgatgctcatgaagaaactatatcaggtaaaggaaatattagaaatgtcaacaaagactctcactggtttggttttggatccacatatataaggtcgtattagctttacattgctattactgaaacttttatcacaaagtgtgaatccagtatgcagtatatattcgtattcaagtgaaaaactcgtaaaaacagataacaaatggaataagtatctgctcaacttgtcagaattatgtagtatatgatagaatttctttgggccgtaagtttagtataaggaatcaattatgtgttcaagtcgtgtccaactagagcaaaaagaaataaaagccgaattactaatttttccagaataaagggactaaaatagaaatataagaaaatacaaggaagaacaaaaagggaaattaatagccctagggtgttgtagggtaaattagtaaatagtaaaatcatttcctcttttggcgggagaattcccccagaaaaattctccaattttatacattttccactcccacaaaaacccattcatcttccactttctctctccgacgaaaatggtaacgctccgccagaggacgatggtggtcaccggagaaccggaacagaagaaggaagaagaacgactctgcgaagacttaacgattctttcctccgattcagacaacgattcttcctccgattcggcggtgaagcacttgcgtggacgttgggaacttgcttcggttctcaatttcttcaatgtaatgaacctcttagtcgtacataccaaaggattcgattttgcctttttcagatgaatcttcgttgtaaacggaatattctttctttctctctctcatgtagtagattctagggatttgttagagcttttgcttcttgcatgcttcaatttcatgggaaattaaacattttgcatcgttggtcatgtgattttgctaaagagttttttgttgttgtgaattgtgataggtctttggaccacttgtctcggagaaattgaagttcacagctgaagaaattgagatgggtcttatcgagtccaacactacaaatgctcagcttcacattgcacttttgaaggtttttgatttttgttctgttattgaccttgcagctgttaatggtatctaacaagctcaagtttatgtgtttgttgccttataagaaaccttctggatgtgaatttttcaacaggggataccaccggtgaataaaacgcttgacgatgcaaatgcatggatcacggtgttgtgtaagaaactagctccatggtggccatgggtaaggccacactgaactcttttgttagcttatatcttctctgtggttttctttattgactcctgtaatgtcattgttgcagattgctaagggtgaaattcatattactgttaacaaagggtaagtggtgaaataatgtgaatttattcaggttgagttggtattgataacaactttcttctcttctgatgtatgaatagggaggaaatatctgaataccaaggacttgactctattaaccgcctgaagattttgaaggcactttgtgagcttcgagttcaagtaattttcttctcttcatttaagttgttgaagtgtatttttaatgcatgcctctttggttacacatatggaaagaaaaaactatatcattactagttgcatttgttactcatcgtcttgtttccattggtggatggtgtagcaagatgatgcacgttcgtatattcaagaaaataccaaggaaggagactgggattctagtttacgcaagaggaagctaggaggagatggaaagaagacttcttattggtagttacacttacttgtcctatcacttctttctatgttactacatctggtgtgaatgtgatcaacttttatctttttttttttaatttcgttctaggtttgatggtaatgatatccaaggttacagattatatagggaagtcaatggaatctcaaagaagaatgctggctcagatttatcttgtttgagctgggaaactgaagcaaccaatctagatgaatttcagagtgtcgctgtaagattttgattgttgtttatgcttctcctctttaagatgtgtggaactatttttcattcattaagtatgtcctgtaatggcagagagagttatcatcaagcaaagcttcttctttggctgcaactgggcagatgattgagacagaagctatacccgttgttgagaaatatcataaagtatctctcaaattccttctttatgtttatgcacatatctgctatatcatgttttttatggtgtttcaatttttattgcaataacagaagagagaaagggccataaaaaagaaaatgaaggaagagatggtcgttaatgtcaatttctcgcgtcctctccgaactactcgttcttgtcgtaaccacatgcctgctacttacacctttggtatagtcatattttcttgcgtttcttccgcttgtttgatatattatttacctgttggcgtggcttattagtttgcatatcttattatccagacgagtatgacaagatgatcagtgatgccgtggaagaaacagagtaagaacttgacttctttcttaatccaagtcatctatccaccaatatttagcacatatgagatagtattttcatttgggtaaatcaactctcaaataatctgatgaactataatgaaaccactgttgatcccttttcaatggcggatatgtgtagactcgttttttaatgtgtaccattggtttgagattaaacatgctaatgctatagctcattcttttctgtctattcatagtaagagatgtaaattgatttactgacagctttgtgtcggtttgatgagaaagctttagcatgagaaaaccccatcattcacttctcttcttgatcagggacaccgatggagatgaggtagaaggaagggatcaacaaagtgcctcattggactcaaacgataagtcaacagaggttgaagcagctgaaatccacaatgacgatgataaagagaatgagataagcaaggaggacgcagagccaaaggaagagtttggtgccaaaaacaggttgagacaaagagttaccaggaactcagccatctgttaatttaatcctcaatgttgttgaagaaatagtaaaaagcttttgaacaacaaaacatcgttttgtctgttggtggagagaccaagctttttgattagaaggtttaggactttttttggtgtgtggtgatataatatatgatgatgatatactccattcctaacagtgtagatttgactcttattaattattatgtggtatctccccatctttgatgtatggtaaactatattctcagaaaaaaagtttaggtattcgattataagtagtttaaaatagatatttcattgtgaaaatatgattgtaaagagtcagggtggccgagtggtctaaggcgccagactcaagttctggtcctcgtaagagggcgtgggttcaaatcccacttctgacatttaattttattaaatttttagcatgttgtaattttgggcaatggcattatgttgatataaattaattaacacaggcaactcagtaacaatactagataactacagaatctggtcacaaaactatgcttaatgttcccatcataatacaacatattacataggttaaatagaactaaaactggttcaagaagattcagtggctccaccgtttgatttctgactctgcgatatgattctgagcttctcatatgagtcagcacaagcgtgagcataatcagacagtgccctgaagatctcaggcaatctgatcttcaaactgtttagagatttctccctcacctgaacacaatgtctctggtgagcttcttcttcttcttcaagccttttcttcagtgtctccacagcaattctcctctctgtgacatgatctctggagcttgttgttgcgtcgtccccgccttcagcttcctctgttggccctctcttttgcaaatgtttttgataccaatcctcaaaaccttgcttcttccgtataaactctcttcgtgtttcttcgcatttctctttcagtttcatctcctcttcctggtgcagcaagatggttttgatgactgccgcgaaagaggagatagctgatttggcgacttcatcgggaagtttctcaagacggtcatgccatgagtggagaagagcttggattggcgggcgctgaggccttggaggtgatgaaactttctctttaagactactctcgatggggattagatttagcttcagccagttgttgagagagttaatgtactgcttctgatgggtgacaagtgtatcgaactgaacatgccattcttccaagacggtgcagaactggcgagtctgatggtgatgctgttttgtggtttctttgagagaagttgagatttcaagggcctttagctctccaacaatacctagttgggtgtcgtggtgtatacacatgtttgtccacatcttcgccatcctgcatatccacgagccaaaaaaattggttaaagagagaaaggctttgcagagaatcattagaaggagaagaacttacccttcaactaaggcaacaagtcttggatacaattgatcatcccttaaacggtttacttcagaaaccgttgaatccatggattgcatgtcaacaatatatcttgtgtgtagatgacttacagccgcctttgttttctccacggtctctgcactcgcacctcgtttcttatgcctgttgagtaaagataccttcttctgatactctatcttcataagctcaccttgctacaccaccaaaacaatgcactcaactaaacatcattcacttctgatagcaatgatcagcttaaaagttaaaagtaccttcacttcatcatagagtttcttctcccatgctaacaatttatccaacaccgtagcatgagtttcatgctcatctgattcttgatcatcttttccaccttctccattcgaaatgcctcttaacgatttattccaagttataacccgcattactctagctgaatgatcaacatatcctgcgaagcaaaaaatttcattagcaagaaagcaacaattgtccaagaaacattcaacataatcaatagaaacagattaggtaagataatggtagggaatagcaagtaaaaagaggttaaagtgttagttagtcaaatcaagaactttttttaatggctttaaacggaaaaagggcaaataagaaaaccaccaaatctattaagtttaaggttcatcttagattctcataaaagttaaatcacagaccaaaaagtgcatcaaagactcatactttaagaatatttgcatacactaaaccctgatgtaatctacaaaagaaaaaactgtctcttctggttttcttttttttgcttgtttcaataagagaaacaaagactcaaactttctaaacaatccaatcacagacacattatgaatcactttaaaaagcagcaacctaagttttggtaagacaactctgagaaaagcaaagacaaactacaatagaataagctttgaatttgatgattggctagggcacatcaaattcgtgtcttgacagtgacactcaataagattcaccacattgcaagaaaaacacacataaatactttgatcatagactagaccacaccaataagattcaccaaatagcaagaaaacacacacacaaatgcttcaatcacaagagtttcaatacctcggttatctgcaaaattcgagtggtaatgtaaccttgtagcttcaagcatcttagaaacctcttgagcacattctgaagccttaaggaatctatcatcaatctcatcaagaatcttcatcaaattcacacttgatgatgcagcagcactagtcttagcaaccgcacgccgaaactccggtggagcagtactcgaatgctcaatcttagctttccctttcttcttcttctttacctccaccaccacttcttcttcctcctcctcttcctcttcctcatcctcttcctcatcttcctcctcttcttcttcaactttctccggcgtcttaggctccatctcctcaactactttaccagaaccagacttcttccgatatatcccagatctttcctcttcctcttcttcttcatcatcctcttcattaaactgaaaatgactactctgattctcataaccattcctaacctctctatcatctaaattaggtccaggcatattctccaccatgaaaaaataatcccaagccatactatttgccggagaagcactcacaatctccggcgttgttttctccaatctcttcctcccattactcttcccaacattctccggcgttctcggttcctcctcctcctgagcagtgtctctaccactacccttaacttcctcttcctcctcttcatcttcttcctcttcctcaatcgccataccatctaaagtctgaacctttcgacctctaaccgccatagaaggcaaactaatcgcacgtttaatcggagaaggagagaatttaggcaaaggaggaggcggaggaggaagattctcaataggcggtggaggaggtggctgaggagaagccggatctacattgttacgactctgtttctcgtaatgttgttgatctaacaacacatcgtctaaagctttttgatcagattcgccatggccatagtcacttaaagcagcaccagtgtttttcaaagcaatagcgtaagcgaaatgaccggcggcgaatgctttgcttgcggaaactgcttctttgattacgtttcgtcgttctttgcatctagctactgcttcttcgttatcaaccctagattgagcacaacccatttgtaaaaagtgaggctttttttttgtttgggagagagagattgataatgaagggaacaaaaatgcagcagagagatagagagaggaggaggaagaagaagagagaagggggtgttttgtctcacgcgctgcgagtggaggttatgttttgtactcgctctctcacgctgtagtggtgtcttgtctctgtattcatatttttatttgttgctaacggtcacatatctcaacgcactacggcgtcgttttgtagcttttgtacacgtaacgttttggattgaaccaaaacattaatgaaaaaggttttttctttttttgggctttttagaataaagaacttcaatagttctttcgtttttttcttttgctttttagaacaatttaactcttgatatttgagttttcaatagcagactatattgttttatttttaggacgaataattgtttgtagataacaaaagtcgtctaacgtgccaacgggttttgttcgttctatatacaatataagttattcaaatacaaataatggaattttaaaccaggaaaaactaagttgatatttctgccaattataatcggtaattataaattaagttggttttgggtttgaccctaggaaggaattacatcacatgtttcttagtatgatatattagataatgtaaattaagagaagtatcatgatctttttgtcaatgactgttcttgaatcttgacggttcaacaaaatactaacataaactttttggggtgaataataatccaccgcatagtactattttctttttgtaaaagggattcgtagtttgtctaatgcattttttcatcctcactattacaaattaaaactaagtttatttctgcaaattctaagtttaaaacaaattaaaaccaaaaaaactaagtttatttctgcaaatttttatatgaagttggtttgggtttaaaaaaaaaaaaaaaaaaagaagttggtttgtgtttgatcggccacaacatgtttttagtatgttattacataaactaaattggcaaaagtctcatgatctgtctcatggaaagttcttgatggttaaagaatactaggacgacaataaaatgtaggaggcccaatcaatttttaggcctcatgattttggcaaaattgtcaaaagtccttatgattttggcaaaagtcccaaaatttgtaaccagtttgtagtaaaactacttaactacgtataactaggacgacaataaaatgtaggaggcacaatcatttttaggcctctttcaatcagttttttttttaatgagaataaattttagaagttaaagaatctgatatctatttggaagctccaatagttagacaagggtttattaatgcttctacatcaagaggtttggggtttgagtctcagctactgcgatttattagcatatttgcatattaatgaaagcaaatgtgcatgagatctacaacgatgtataattatagctgtttgccaaaattctatgcagagaagatattaaaaggtgtccatcaaacgtatggagaaggagaaaaagtatcatctgtcgtggatctaataaaggtcggaagaaattatccgtggtagaatcgtttatgtaacaattttcataatttgtaataaataataaatctagacggcaaaaaaaagaatttgatacttattttgttgccgaaacctaaaattggggacttacaatatttatatattattctcttcatcttactttaagtgatgttttcgagattttattttttcattttaagtggtgtattcaattttctatgaaaaaataaaatctattcaatagtttttttaactaaatacattgtatagtatgtttttattttggttgaattagttatagctaatgattttttgtgttaaaaagataaaaaaaaaaaattttaataatgtttttccaatttgtgtggcaaaatccttaaatatcactaaaaatgaaacaatgtgtatattgttttgttgatttgtcgatgggcctcataaatttagtagtctgagactaatgtttcaccttatttacccgaggactaaccatggttataacttataactatttaataataaaaaatattatcctctctacaaaaaacatcaatcacaacctaagtgaattcaactatcttaaaccacatctattttcaggaccggcccaaatttttgatgcctaaagcccaatacaattctttgccttttaacaaattgaaatgtataattatcaaaacatttaatggaacaatgctcaaactcgtgacattacgctattaaatgagacactaattactagattacaagacttttactcaaatttggtatctttttaaagtaaaatataattgacggaggttttaggtctggaccggttctatatatctgaaaccacctccatccatgagttgacggagtagttgggtgtctttaaaaaaaagtaacatatttagattttagacacccatccaatttttatagtatcttcctaatatctcctctttttttttttttgccaaaaggtgttgttattgatattaaacattgtacaatacaacatacatagactgtttatataaaacaaggacgtctagatgaagaaagcaaataacaaatattacaagactagttaaggaaacaacaaactgattaaggttttatgtacaaaacagagacgactaccaaaggagagggccagacgtggtagcagtggtggaagacaaacatcctgacatctcaagaagaacaacaaaacgaaaaacaagtttcgtagttgaacttaaagcttccatcttatgtggtgagcttcttgcataccaacatgtcaaacgaccaagaactatcagtagcagagtctttctgtgagataaacctttcaaaagtgtaacactatcaagcagctgcaagtagaacaaaaagtgacagaaacctgaagcaatcaaagagagattgcccatccaaaagcctgaaaagaaactatgtttcctaagtactaagaacttactaaaaaccataaccttaccccaaaaagtgtaagtcacagagtataagggtatgttatactctgaggagcaacagtcatagcagatctatggtgtgttatcagactccgaataaaaccttactccataatctttgcgatattgtttcttctttttatcaggagtaaggtcaatctgctttccttttctgcgtttagaactctcaccacatgcatatcttgattgatcattaatagcagtaggagtggtggaatcatcagagagagctttaggacttactaatggaacacttgaaggaagatgttcaatagcaggttcattcaagtctaaacccggtgaagcagaggttggtgcctgtgatataggtctgtgagaagagatatcagaacttgaagagtgattcgcaggtggagggggtgtaggattgttcgatccccctccctcttcccaaacaggaaccatcaaaacatccgcttcatcatcaacaacatgagcaccatcattatggtgatcccctgaggagccagataaggacagtgatcaacatcatggttgatacggcagcagttggaacaaatcctgtgaagtcgttcatattcaaaaccaatcatggcaccttctcgtgattcaaaccgcacccgtcgaaagaaacgcatcctatccgtgatggaaatcctcactttcactctgataaaggctatctgagtagaggtctcttcatcaaaatcaagccccgtgactggccccagagtactagcaataaacctgacagtcatagtagacacatagagaggtatgcctctaacttgaacccaaagatcaatataggtaagaaagtcagcacggggaaagtcttcccatctctgcagaggtacaaaccattggttgaataaccatgggcctctcagcatgaccgaagccaagtcaataccagagcgaaaacgaaactggatgcacctatcatcaatgatgcggccatgtacacgagaagccataccccagctgcgaggcaaggccctaagtactcttctgaggtgttgagcatggatgttaagcggtcttgcaataagactcagtctgttgccagcaacaacaacaccataagctgcctgaggtacaaaaagttctggatcatcacgacccaaaaccatgtactgtatatcatgccaaatctcatcagccatcaggaaacaagaagaagtaaagaaaagaagacactataagaagtgaaaaagggagcgatatcccctctttcaaacactcatattaaactagtaataaaattaattctacaaaatgttttaaacactcatattgggtatcaccaattaatatggtctacttgctgaaaattaaaatttcctgtcaattaagccaaaacatagaaatggtaacatttcagctctaattttattataggtttttgcaaaaccacaagatacagaccacaaaagacagctacgtaggttaataaaaaaaaaaacatatagatgccttcactcttatatggaaaccacgcattactatatgtatatgtatgtatattcataaccaaaacatcccaaaagatagattatctgaaacgtaattatacataacccacaataagatagaaaacagatctatctagtagctgaaccacacaacatgagtctccgggaggaagtggcagaccggaacggtccctggcttcacctttaagactttgaaggccaagtggtttgggttccaagctgaggtgttcttgtggcataccgcaactgctttagctcgcatcccgttctctccctcgagcggaaccgcgtagacggtcgtcatcatcgccttgtggcagtagaacaccgcgaatgggtacttctgtttgtgacacaccacagatttatcgtcagacaacttctttaccccagccgccgcgattttgtacttctgcatcggtgcgttcttcttagccacctgtagtaaccaaagttacattggtttatagccaaaatattagccacaatatatatggtgtggacatacaaatcaactgcaactaaaccgaaccatgtgttttcatgaatggttagattggtttatatatgtaaatccaaagaaaccgaagctaaagccaaacgtaaaccaattaatttgagtataaacgaaccacacgaacttaaattaagaaataatttctatgttaaactatctaagaaaaattagatcgaaccatgtttaatatttcttaaaaataattatagctaagtacatagtagctatttgtatatgttttttacatcaacctgacccaaatctatcatagttatttatgtcttatatttattttttattcataaaagaagaaaagtaaatttgacagaaactacatcaacctttccaaaaaattatccaaagaaaaccgaattgattatatacaaattatcttatatttagtattaatcttatatgttttcagtcaaaactaaaccggtaattaaaaaacagtagttagtatttttacctcagtggaaacagccctgacgtgatatttaccaagtttcgaaacactaaagtcgaccatcgactccaaagacgtcgcacaatacttctcctctccactaacttttctggcttcacactcctcaatggtcttcttcatcatctccgcttcttccgaaccagcttccaccgagaaacgtttcaacgtctccgaaaacttctccgatccaaaaggcaccgtttcagcctctccacgtggcaagaacgcagttttgcctccgtaaccatcctcagcgttaaaccggacattcatttctttcccgcgaaccaagtccttctccaagaagaagagagccgcgttaggatcgtcgtggagctgagtctccttcgctgcatagttatacacgaaagggtttgctcctggtttcacaccaacgtaaatcggtcttcccttgtggcgcgtgtgcaccgtcacaccgcctttaccgactcctacgtcggttcttttaccgggtttacccgtgtggactgcgacgccacctccgtgaccttttccgctgccaacgctcacgtgtgtccctcctccgggcttgcccttgcctgtgtccacgcgtacacctccctttccaacgttcacggcggttccgctaccggttttacctttatgggtgttaacgtttactccgcctttacctacttggacgttggtacttttctcgtcggtaaaatctgcaaaaaaaaaaagtttggtaaggaaacatttattttattaacaactaaaaaagaatacatttatttgctacatacaaattcagaaaaatatgttgaaatataaaagaaattgtaataatacaagtcaaacacatctttatttgcatttatgtaaataaatattttttgtgtgttttaaagaaaagaaagaaaaaaaacagttaattatggagagagttgggaatggaatggcaaacatgtatttctaacactagtgaaaaccataatataaattcataatataaattcagaacaaacatgtatttctaacattaagaacaaaaataagtgagagagttgggaatggcaaagtaaaatattttaaccgaaagtcaaaagattatggagagagttgggaatgggagtgtttggtaaagcagtgctccaataacgctccggtgttaaatcagccgcaatcgccactaccttcaataataaaaagaaaataacatcaaaccacaatgaataaaaagtagtaagaatgtaatcatgttttgttcgttttgagtttataagtaccatgaatgaaccaagaagacagatcagaggaagacgaatcgccatttttgggagttggaatagaaatgggtttgatgaatttgaggagaagaagtggtacgtgtacgtagaatttatagtaaaagggttttagtagaaaggagctgaggttgaagttatgatgagtatggatgatatagacggctactacttaccaatctatttgggccgattaattatatcacataccttctaaccactacgtgccttctgctccttaaatgctcttgtatccatgtgtggacatgtgtttttaatatctctagtttatttttgtgtgttacgttatactacttcgtttcgtgtctttcttttttttgacattcctatttgggtcctatttgttttgctgccatggaaagcaaacaattattcacgaatgttttctttgggtgatcactgattagttttccttagctcaaaatctttgattaagttcggagttagcgttgacaggtgaaatttgtaatagatcaatctggctggcccgcccaatccgatccaaaatcgtcaaaacccacaagtattgaagtacatactgcccggtccaaaccgggattatattttaaaactactaacttagttcagatattttcgagttatttcagatattctacgttatatgttttaattgtgctagtcttaagatcctttgattaaggatattgattcaaattttattgtaagtaacaatttttaaaactttcaatttctactagttaaaactggaaacaaaacaaagttaagatttcagtgaacataatagatcttaaaccttttatacgaattactcgaaaccagaaaatcccgaatagttgaatatcaagacctactttgtatcactattattgtgtatataagttttagtttcatataaagattttttttgggtaggaatttaatgagtattttttgtgctaacatgttattattattgccatacttcatatttggatttatagatttatagaaccagtaaaccagttcttaaaacaatgtttttatagcaccaaacgaaccccttgtgaagcttagagaattcttattttgcagttaatggtcctacaaagtggttgcaagtaaaaagttgacgtttcaatgaactaacaaaattggccatattccaaataattatttgaaatagattacatctttaaagaaacttctcatgcatccaatatatataattaggattttagtaccactctgactcaatctatcgatcaagcttagtgtgatagttaaacgcggtagatagctattaataatactttctctgtttcattatataggatgttatagtgtttttattttgtttcattatataagctattttacaagtttcaatacaaattttaaatgtattgattttatgactttttagattataccatctcttttgtgattggttgaatttttaaaactacagtattaaatgatagttgcgtttaacccaaacatcatatatatagaaacatagggagtaatacttattttatttttgtacaaaaattaatgttttcaaattttaaaaagcttagattcacattacaacgtagatacattataacaatatatagtaattagaagattttcaataaaaacattttaatctgaaaacaaaatatggcataacaacataatttgtgtattaaatataggaggattataatgagagtaagttttagaagtaagaaagttattaaaaatgataattattttactttattctttgaatatttatttttcttttccgatatcttaattttaaaatatcaattaattatatcaaaatcaaactactaataatgatggacggtcgttgcccgttggcatgtttcgacggtacttcagtgtcatgtgccgaagaaattttttcacttcgatcgagaatatgttcaaaagcaaaaccaaaagagtgtgggggatctggtaatcttaactttcgtgtggacttttcagacaaagagaaattaaaacgaacaaccaactcatttatggctcaccaatattcattcgttttcatcattattttcgatattattttgtttcatcaatccatggttggagaatgagtgaacacctatgtatttaatgttgttgattttggttcaaatagttttgatagtaactctcatcccaactacggacgctatgcttgccttttttcttttccagtgataacattataacatttgtactgtcccaaactaattggtagtgagtagactcccaaataccacttatatattacggtttaatcacattttgaatgtggaattttcattctactcacttgcaatatatcctacttgagtcattttacatgggtcaacaatcttaacgttaatatcatgaggttctaaattaaaaccagttgacaataagtaaaagcgcttatgtatcttatacattactctagaagcctatcaacttctgatatggcgaatagaaacattctaataccccttttccgcttagaatggacatctaaacatgaagtttgaggaaatgaacatacaaaggtattttaggaattatcggcctacaattcaaaactaattggtggtactgagtgaattattatatggtacatatacattattataggcttctcaaacttttaatgtgggattcttaatatttagttcattaatttctgaagctcgaaacatttttcgattgaccctaatgaattccataaaatatttatttgtgtgtttgtcctcacttagttgtgtcacttatcatagttttatcgttacctaaacgtaaacctagttttatactctcttgtgggctaatattcggctaactcaacacttccgattaagctccgaataatgtaaccactatatacctcgttatttatggctataaactcttatgatattttgattagataaaaaaaccaacattaccttcttttttgagatgtgatttgcaaatacaatgggccttatacccaaaaggcccgacatcaaaaacccaatatcaccttcttttctggcaacaatcctctatcactgtgttaaacatatttgctttcaaatgtgaaagtgcattttctttgtcacatgttcatcagttcaaacgagacagtggaatattcactgtcccgaaaacaaaaggggctcgaatggttaggtgacaatatacttagcatattgattaaattttagtgtaagtcactcaattatttgtatattataggatttgatagttatacgtagcattagccttttaaaaaaatctattatgtgaacttgaatctaatttttttctttctttttaataacatacaccgcttagattccacttagctgtttgttctattaagcaaaataatcataagtttttctttttttttatgtttgttgtgtttgattgatttattgtatcacatacttctttccaacactctctacctaccatgtaaatacttttgtaaaggttgctataaccaaatcgggaattcagacactcaacagaaaaaaagagacttggtatatatatataaacacacacggtgagacttgagagatattattttgatttcttactactaaagaaatgaaaatggaaattgaaaaagaagcataaagaagtgacaattttgggaaatgggggatagtgagtgactgagtaattaagtgttatcacactctcatagtgtcatgctttcaccaaccatcagccccacaacttttgctaagctccaattgtatctgatcatcacttgaccaatctatacaataatactttggctgatacagagctaatgtgggagttggatttggcttggagagtccaacaaatctttcaaaaccaagagaatgtgcggcaacatattttacggtatggtttagaagattgtgtaaaattctctttacataaaattacaataaatcataagaatttgtcttgtttacacgacttagtgatacagaacaacaacaacaactacaacaacaacaagagtgtcacataacgaataaaatggaatatccgttgttcaacacttataagtatatatatgtatatgcattggaatctaacaacactttattctttctcttgtaatgtaagctaagaaagaaaaaacacaaaagagagacaagtatccaattatgagtatgcacgatcacgatccgtcatcttcgattcagctataaaaggaaaaaaagagagaagaagagtggaccctaaagtgaagagacatcacttttgtaatcttaatcgctattgcatttcaccaggaaggcattagtatcttctgagaccttttagtcaggaccactctttgcacctcatttctacacttatttccactttagaatctttgtctcatctcttcgcatgtgagaggtttttgtgtaatcatctggtttttcacacatgcacccgtttatagatacattattcttcaatatgacatgtttttatatcaatcctcaattatttgtaagaatgattatatatgctaaaaagatctacgtaaaactgtttaaaccaatttgtcatagaattaataaaaaaaacaaaattgcaacactatcttttatttagatttgtaaccctaacttaacacactacttttgatatgtatatacttcatatgtcattttatgttgccatttaaccactataagtgttcttttcaaatattagaccttctaatgtaaaaacataagattgaaatttgacccaaaaatataatattgaaatacatgacagagaaaaaaatattgttgattcaaggaaatcgaaaaagaaaatatgaaaacaaattgcagccactatcaaatgattttagtaatttggcatgcgagcaaaaaaataattaatgaaaaatttgatgaattgaactccaagtttttttttatccataatttctcgtaatacaaatataaaagcggataacatgacgcgaaaaatttgtactgaaccgtttcatatcacttatataaacaatatttttcagattttgttcgtttgagttctatataaaatcgacacaaaaaaaaaaagtccaaaatgcttatttgccatgtttttaaatcaggtctagggtggttggatcaaaattttcgccatgttaccaaaccgataaccggtacaagcccaaactaaaaccagtagatatatatatatatatatgttttgttttcttctaacggtctacaaccatgttgactaataatttgcagtttgtctgcaatttgactaccgtttcccgcatagtcaaactcatagagtcataggtaatagtttccactttgatatttatttcatgaatgtcttaacttttctaaaatgtatttgtttccactttgtctttattttttcttttaaattattttcttcgaactattgctttctcatgattacttgaacagattgttaattgtttggctttcgtttccttatttagatatatatttcaaataggaagaaagtattcaagaatatcacctacaccaaagtcaaatacaggacatcaagtatgtatattcggcatggtcatatgtcattgatcttttgataaaagtatattaacgtgtaaattttgctgccagattaccagtagaatgattattattatttttgtgaaagaaaatacaaatgagtgcaagcatgtgtagtaaatcttaatatgcaatttcctggtgtagatgatcatatggtcgaggttctcgtcatatatgtatgtctctaagttagaaatgaaatacaagaaaattttaaaaaggatttagaagataaaacataatctatcgccaaaaacatgtaggcatgtaaagcaaggccaaggtccaagatgttaatatcaacttgatatagcgctagcttacttaatattataccatttatgtgtatatctcatcaattagaaaaaaacttttgagcatatattagcaaaataacaagcatgcgtcatcctttctttttgttaggttactacgtgatgaactgatgataggctacgaattttgttagctattgttgttctttttcttacgagtaattagagacttggagtgatgctaatagtttcttgatcggagatggatggataaaaaaaatatcagcatcactccaaatctccaactcgtaaatattttttaatttcgaatagtctcaccgtagataaaataaattctaccataatataagcacattagctagaaagaaaaactaaaacaaaccaacatcttcacttttatatatataaataattataatttttaaaaatttatttgtgtattgagttacaaagaatatgttatggaattaagatactccaacgcatcactcaaaattttgttggccaacgattgagcttcaaagcccagcctaaaaacgaacctaatttgtataaccaaatctgtaaaagctgaaactttggtgcaacacaaataccgcaattagtacaagtctcattagatgattcaaaattatggaaaacaaaacaaaaacattggtaaagtttggtgtggcttttattagttaaaatcctcgtgagtaattatggagagatgcatcgtcacgtcaaatcttctgacatatattaaaattccaagattactcgtttttaatcattgaacaatgagattcataaccgaacaaaacgaaaatcataaaatcacagccgtgagatgataggacatgtcatatttgactgctaatatcaccgtccgatcatcttttcccatttaattaaatcaattaacggacgaaaactgaaatggtccatttgagaccgttaagacaatgaatgcgaaggaccattgagagtttaaagcattttggaatcggatggttcacaaataattgggaccctttgatgccaaatgtacgacaacggcttgttcgtccagcgaggtctcttcccttgtggaggaggactcattttggaccactaataaatactttgcaaattttaattatgtttcaaacctattttccctcttctatgtgagcttattgttattattatttttgttaaaggttttgtgaggttatttttatttcccgcggaattttaattctttagattattattttttctctcccttatattttttttttaatattacaccattcgtaacataatatgattttttggagttatatacgttttaaaatcagcattaagtttttagaggttgaatcgttttgagatcaagaagtaagagttttaaagctaaatttgttttaaaatcggcacatgaacggtaacatgcatttcaatgttacaagtttaagtctacttctcctcaaaagttcaattacaaaatattaaacacttttttttatcgacaactttattagattaacttaaaaagattaaatatgactattaataactatacaagatttcttttcaatttatatatatttttttaaaaaattctaacttactataagtcttacaatattattacatatatgtagataatttgtatacattaactacataagaattctcatcaaaattcagttttatttaatattattttcattttattctgtttttaatacaaataaatgatgatgcatttcttattttttataatttatgatgcaatactttgtgtaacatataaccaagaaaaccccgtgtagaagtcattttaacacgacgctaaggcaaaaatgataattagtacgtagaccacaacggaaaagcaaatcagtctcttgaggcaacattgccattaattcgactaaaaatataattaatgttttacatagctaatttacatactacaagtaaatatttttagaacgagaatcagtgaaacttttttttttttttggtagaaacgagaatcaatgaaggtagagcgtgccaaatagagcattagtgactgtgacacgtcaaaccaaagccttgtcacattgctatcatgcaagcataaatgttttggtgctcgaatctaatgcatacaaactccagagttgagttcatgcttgtataaactacagcaaccacgtcctaataaacctaaaaccgatattatatatgctgtgactcaagaatatgtttaaactttgttagattcgatatttgtgtcaaactctacagtctacgtataagcaatctactttgcatatcaaactaatatatacgcttataactaaattgcttccaatacatgaaaatatgtgaagaccttaacatagcttagaacttaactagtacaagtttatggttttctgtgaattgttttgagccagagtggtaaacatatgaattgttttgaatcaccgaatatgtttttttttatgtttttttttttggaggacactctggctcctctaatattcaaaatagaaaaaagaaccaatacttcgtggaaagtcacaaatgaaattgtaaaagctagaaacgagaaattgtttcttacacaattagtcgactatgaattatagactccaacatgttttcagttctcaagctttcaaacctattttacttctctaacttgaccaagttcttccattcacccaatttagcaaatgtttcatcctttaatttatgtgaatgacataaaaccatgggtatctagatagtcatctatgatggacataactcaaagttatatatgtatgtgcataccaatgctaaatatatagagttccacctttttttttttaattgaaactcacctttttttattgtatgacaaagtgttcacaaaattcaacatctccatcattttttttaaggatgctctttccagaaagaacaaatagcttactaaatgctcatgttaccaagtccactatgccatactgatgatatatagatacccttttcggtagaaaattgatacagctcacattttactgtcttcctgtctaataattttagtccattagatccttgtaatgtcattttctagttcttgtaaaacaccattttccttgttccacgttcatgtgtatcttcataaacatggattttattgggttttttattcagaaataatagtggtcattttttgttattacaagttgattaagcagctgagctaattctatatgtacatgtactagtttgtacagtgataagttaatcagttttaactattttaaaacgaactcttttttatttgtatacagtgcaagaaaatatagtgaaacaataatctgatattacagttgtatgtataagatataggggacgcaatcatctatactatttgatgtcaaagagcaccaatttccaacacaatttggttgacaagccaaccatataattcagagccaagaaaaagcataaaactaaaaaaaggcaaatattaaagaaagaaaacttcagaaaaagcagaaacattatttgaaaaaagtaagtgctacttatgttaaaaatgtgggactaggaattgtaatgataaatagaatctgttcgcctatttggagtcagccactactaattactacaaccagattttaattgaaatgaaaaagtgaagttttgaattaaagattcgatgttgacaataataaaattgaaagatttgatttgggatctgaatatctgattttgtttcctaaaatttccccaacagcttggcaaaagtgtagggctccagcttgttacttatgtgccttttacaaaagtaaatttctctgtaagatccttgttccccttttttccttttccattatacttgccataattttctctttatttcatgtataaatatctcttctcatcaattaaaactccaggattttaaataggtatatttctgagtgggaaaaaaatgaacccatcgcgtagagaaatatatgtcagtatacattctctaattacattgactttttaaggtcatcacatgactaatggtccaaagacttcgaagagaaaaaaaaaactcttatttggtaggaaacttgtaattttgtaagtttccaagaaaattttggtactaattcagcaatttgtgtttctgatgaagttatggatataagttcgacctttagttagtccatatcactccaaaataataccattttttctttgggattgaaaagaactctaaaagttggttttttgttaactaagtcccgtagcttggtttattggattaaaacatagttagagagttttaaaaaaatatttccacaatttctttacaagctgtaatcgtgttttgaataaaagtttgtgaatctccttgttagacaaccaaaacaatcgcaagactaggggtgtcagtagtgtttttcatcttccacacttaactaataatttgttgtttaatgaatctaccatctattactatatagttttgttcaactttaaaacgaagatgatatagaggaacaaagtagtccaaatttcaggtgactcacacaagagaaggaaacactaaaattgagacactccatctactgattactctttttcgacatgatggcttacatcaaccatgttactcaagaccttcatcctcatctagaacattagttattccatccaaaaacagtcattgggtttgagaaggaaaaagaggcttcaatgtacgtagagtggcatcaagctcaaatacctaggctcagctctttctcgccacatatcataatatctgtgacattctcttcggcgagataatcgtgaaaatattgactgtgggggacacattacctcggtcgcgctttctcattttaggatcaaacactaaaaatataatcattatcagtttttccttcaacttaataaatttaacgcctatatcttcgttgttattcctacaataatcatattttttcaaacgttattttttgtaaaaaaaacttttaagtagtcttcttttgcaactttagctctcatctccaaaaatacagctcaattctataaaatcaaaataaatataactctcatacagatcttctaaaaggttttacaatcacatgcattagattttcaaagttataaatgtggacttgaacttctcgttgcgaggattttgaattgatattactatttatcaaaatttacaaatttgacaatgatgacaaccacttatattgccttgtacttttaattttgcggagttgatatgtatctttttagaaatggaagttaaattttcaaaatatgaacaaataatgtgttgttgtgtatatgtgatttatgttagtattcaaaagtcgttttaaacaccataacaaaattaaacacttttcacttttagaaaaaaaaaagcgtgaaaattctcttaaatggttgaacgtctttcagattcaaaaggaaaattaccaaaatacataagatatatcattattcataaataatttcttgttgtaaatcacttgttggatggactccataaccgtggcccatgtccttggaggataggtccgtcagcccattggtgtgacggcccatcgaccagtcggcccaccagtccaccggtccatcggcccgtcggtctgtcggcccggcctatggagagaagccacagttggtccggcccgtaggtccggcccatggagactagacataggtcggtcatatacttaagtagttatgggcttttgtaacctagcccattagacatgtaacctcctcaagtatgtatatatatgtgatgtaacctcattatgaatcgataagaaacaagttagttcttcacacgttatcagcacgagcttgctcttaacaaaaccctagcagccgtcgctcaaccctagctcgtccgccgtccgccgtccgctgttccgtcgaccgcctgtcgaccgtttgctgaccgtctgtcaaccgacgatacttccgtcgaccgccgactgtcaaccagcgaccaccgtttgataaccaaggtctttagctcccggttccagtccgtacaaccccaaaggagaaaggtaattcattaaaccctaaaactaaagaaccctaatcgaacatggatctaacaaacggctcccggttgattagtgtttgcaatatgattgcttgtttgctcgattgtttgtcttgttattgcttatcctaaacttgcaaatcgaaaacatcttaacctagaatccgaaaccctaaaagacataaaccctaaatcaaaaacactataatcggatcaaaaccctaattctatttcgtgattgtttgaagttatctagggtgtttagtttgattgatttcatggttgcatgcatgaattgttaaaatccctcatgttgcataaaccctaaaaccaaaaccctaaggaaaatagaaaatcgctaaaaaggaaaatttaccctaagaccgaaaaaggaaactctcccaaaaggaaaaagaaaaaataatccctagagaaaagaggaaattctcctaaagagaaaagggaaattatcctagagaaaagaggaaattgtcccaagggaaagaggaaaagagaaagtcaaatccttgagtaaatagaaaaatcgatttatggtcttcatgacatttacgatttgtccattacatgatattgactcgtaacttcttcattgtagatgtcgaagctcacaaacctcatgtacgctgcactcttggcatctggtgacaattaccttcaatgggcattggacaccaagattgagctgaagtctaaaggactcgccgagtgcattgtggaaggcaatgagaaaacggagaggtcaaagtatcaggcgatttcaatcatacgccatcacatagcagagagtttgaaaaatcagtaccttacggtcgaggatccacttgagctttggcttgagttgaagaatcgatacgaccaccaaaggaccatacaactacccaaagcccaacatgattggcttaacctcaggatccaggattacaaatccgtggaggagtataactccgagctctttaagattgtctctatcctgaggctgtgtggtgagaaggtgactgagaatgacatgctcgagaaaactttctcgacctttcacgcgaacaacgtactgcttcagcaacagtaccgtgcgaaagggtttacgacttacacaagtctagcctcctgcttgcttcttgctgagaagaacaatgagctgttactcatgaacagcgcattgagacctcccggatccacagctgtgcccgaagccaatagagccgaaatggccaaagcgcctaatgaacctcaggcgaccaaggaatccaactacgtccataggggtaaccctcacggccgtggccgtggcagaggacgtggtggaagaggtcgtggcaatttctacggccaaggaaaccactatggtggtagaggccgtgggaactatggccgaggtagaggtagaggccgcggtgttaacaaaccgcgaggaaaggctaagtccgtgtgctataggtgtggcatggacgaccattgggcaaagacgtgcagaacctctaagcacctcattgaggcatatcaagagatgataaagcaaaagggacccgaagccaatttggttcatctcgatggtgaaggggatttcgaccacgagaacgatgacctaatggattatgagacttcggacatcttgggaaaatatacatctagttttaaatttgctttgtttgctttgctttgtagtttgatctctattgcgcgatgtcttggatttatttattttaatggaattgctttgcttcattattgtttgctttatcgcctaagatatagttcttgtccacatttagaaatggccgaggacaaggacatactcatagtggacagtggctcaagccacacgatattgagagacaaaagatatttcataaatctaacattgagaaatgccaacattagcactatagcgggtatagcgagtctcattgagggctacggccaagcccatgtactcttaccaaacggcacacatcttgaaataagtgatgccttgtattcacccagctcaaagaggagcttgttaagtttcaaagacatacgtcttaatggtttccacgttgaaacaaagggtgaagggaatagagaattcctacatgtaacagagatcgcccaaggacataagagagtcctagaaactatacccgcattgtccactggtctttatcatactaagatcaacatgatcgaagctaatttggcaatgaacaaagagttcatagaggagttcactttgtggcatgaccggcttggccatccgggtcataacatgatgcgaaagctaatgataagttcaaaggggcacaccctaaaagaaaagagagttatcccaaagaagctcacgtgtgctgcatgtgcacaagggaaactcataataaggccattaccggcaaaggtcaataaagagaccataaactttctagaaaggatacaaggggacatatgtggaccaatacacccaccatgtgggacgtttcgatacttcatggtcctcattgacgcatcgacaagatggtcacatgtttgtctgttgtcctctaggaaccaagcatttgctaggttactgacccagatcattcgtctgagagcccattttccagattttccgcttaagactatacgtctagataatgccggtgaattcacgtcccaagcgtttaatggctactgtatgtccatgggggtaagtgtggaacatcccgtggcacatgtacatacacagaacggattagcggaatccttcattaaacgaatccaattgatagctcgaccattactgatgaggtcgaggctcccagtagccgcttggggacatgctgtattacatgcatcggaacttattcgtatcaggccatctagtgaacacaaatattcaccatcccaattgttaacgggtcatgagccagacatatcccatctaaggatattcgggtgtgccgtatatgtaccaattgctccaccacagagaacaaagatgggacctcagaggaggatgggaatatatgttggatttgattctcccaccattataaagtatctagagccaacaacgggtgatctatttaaggctagatacgcggattgtcacttcagtgaatccgagtttcctgcgttaggtggtgagacgaacaagctgggtaaagaaataaaagagatagcatggaatcaaacatccttgaattggcaagatcctcggactctgatgtgcgattcagaggtccataaaattatacatttgcaaaagctagctaatgagttgccagattcctttgctgacccaaagagagttgtgaaatcgtacataccagcttgtaatgcaccagtacgtattgatatccagaagggaatcaatgtaattgctaccaagtctaacccacagaagaaacgaggtagaccagtaggttccaaagataaaaatcctcgaaagactaagaaaggtgcaatgggaaccgaggtaaaggaaaccatagacatggccgcggcaagtcctaaggaaccaccaaatgagatttgggacgccgaagctcatggtcctgaaggaattgataatgatgagatctcaataaactacatcatgtctggaataaaatggaaccgaaaagaagtcgacgtcgacgagaaatttgcatatgaggtagcatatgagataaatgaggatcatgaacccacgtctatcatagagtgcactcaaaggtcagattggctaaagtggaaagaagccattgacgtggagttaggttcattaaagagaagagatgtgtttggtccaatattgaggacaccatctaatataaagccagtaggacacaagtgggtctttgtgaggaagagaaatgagaaaaacgaaatcgtgaggcataaggcacggcttgtggcacaaggattctcacaaagaccgggagtagattatgaagagacatactcccctgtggtggatgcaacgacttttagatatctaataagtctggcaataagagagaaccttgacttacggttaatggatgttgtaaccgcatatctatatggtccactggataatgagatatatatgagattaccagagggtattgagctcaaaggaaaagataagaatgggtctcgagaccaatactgcataaggctgaacagatcgctttatgggctgaaacaaagtgggcgcatgtggtacaataggttaagtgagtacttagtcaaagagggctataaaaatgaccccatcagtccatgtatcttcatcaagaagtttgctagcaaaggatttgtgataatagcagtatatgtggatgatttgaacatcctgggaacctctggggaaatcgcccaaacagtcgaatatctaaagaaagaattcgaaatgaaagacctaggcaagacaaagttctgtttgggattgcagcttgagtacgtagataaaggaatccttgtgcatcaaagggcatatacagaaacagtactcaagagatttaatatggacaaggcccacccattgaccagcccaatgcaggtgaggagcctaggattggatagtgatccattcggtccaaagaaggatgatgaagaaattctcggtcctgaagtgtcatatctcagtgccataggagcgttgatgtacctgtctagccacactagaccggacatatgttttgccgtgaacctcctctctagattcagttcttgtccgaccaagaggcactgggaaggaatcaagcatttgcttcgatacctacaagggacaattgattttggtttatattatactaaccataacaaagaaggtttagttggttttgctgatgcaggatatctttcagatccgcacaatggaaagtcacaaacgggttatgtgtttactcatggtggaaccgcaatatcctggagatcaatgaagcagaccatcgcggccacttcctctaaccaggcggagatattggcgatgcacgaggccagccgcgagtgtgtgtggttgaggtcaatgactcaacacatacgagccgattgtggaatggtcgaagccaaggagccgactatcatatacgaggacaacgcggcatgcattgctcagctcaaggaaggatacatcaagggagatcggacgaagcacattctgcccaagttcttctacacgcatgacctacagaaggatggtgaagttaaggtggtacaagtacgttcaagcgacaattcagccgatctattcaccaaggcattaccagcaacgacattgaggaagctcgcgcatcagattgggatgcggaggcttaaggacttacagggatgaccaattcagggggagtaatgcgtgctgtactctttttcctcactatggttttgtcccgaaagggttttcctagtaaggttttaatgaggcagcatccccctagcgcattactgagatctcgtaggcatctacacggttatgtcatccaagggggagtgttgtaaaccacttgttggatggactccataaccgtggcccatgtccttggaggataggtccgtcagcccattggtgtgacggcccatcgaccagtcggcccaccagtccaccggtccatcggcccgtcggtctgtcggcccggcccgtggaaagaagccacagttggtccggcccgtaggtccggcccatggaaactagacataggtcggtcatatacttaagtagttatgggcttttgtaacctagcccattagacatgtaacctcctcaagtatgtatatatatgtgatgtaacctcattatgaatcaataagaaacaagttagttcttcacatttctttttatttgatcaagtacataattgaaaaagaaaaaaaaagaagctaaaagacatctgtaataaaaattagaaagaaaaatttcgacataatttatacctatattatattgtctaaacacttcttaaaatatcgcatataatttacagtcaaaatattgctcattatctaaacagaaacattcgtaaaataatttcacctcccaaattttaaacaaaacaagcaaaaacaattgcgatgtctgaaaattcacctcgtcatagacgaagtagaaatcccaaagaagcgaccataaggtataattagattttgcggagatacttgtaacaatttttaccatttttcatgatattgaagagatcctatcaatacggccaagataaaaacaacttgattatgagatccacaatggaatctaaaatggacgatctatatatctgactagagagatctagtatagatttcaatatgtccaaatttattaacaaaaatatgagaaaaaaaaaacatgtggaggccgtacatctagcaataattggaaaaaagggtcagcagaattataaatgtgcaggtcttaatttctgacgaatgtacaagcagtggtcctaatttatatgacacttctactagggaatgaaatcatttcgacaacgaaatttcattgacacactcattggtaggacacatattcaattacttatgtccgttaaaaaaaagtaagtttagttaaaacaaagattatgtatataaacaaaaaaaacctcaccacaatactctgccaaaaaaaattgaaccaaaaaagagaagaaaaacaaagagcatacctaactatggaaatctaaaaaaacaaaaataaaagaaagaaaagagaaaaagaaaaattagaaacatagaaagaaggtatagaaagatttacaaagtgggttataagcatgcaaagagaagagggtcccctcctctcctttggggcagatgatcatcaattcccaccacaatcactctcactaaatttccttttcattcttttccccaatttgcattgcagctggagataagtcttaatttacatcacctcctttgaaacaaaaccatcaattttttttcgatcgctaccggcatttggcaagttatgttttcttgatagaaaaccttagcttttctctactgtctagtcaataagttttgattcagattttttttacttgctcgtcttgtttccaacacttgtgtatgtcttcagctattctctttgcatccattgatgctccactaatcccacgttttgtgaatccgaccgcgtatagcccacattcccctctccatccctcagggaactcttgtattggaaatccatctttcttactaaacattttattctcctgaaaaattatatgttttccaaaaacccatttagtacaaaattcataatggatgtatatttttggtcttaagaaaataagaataaagactttaataatttgttaaagaaggtggacaaaggtaaaataacaatattatcattattattgaatacctttagccaagagggtacgttgcttttgtagccagttgctaatataatggcgtcaaatctctctgtttttccgttatcgaactcaacttcatgtcgttttaaccttcttatccccgaacacacctttttaccattaacaaaatcaactatcacaatcagtaaactggtttttagtatgtattcatatcatatattctttgattagattatacactaccttaatgtctccggttttgattttggctagcgtgccaacgtcgagaaccggagttttaccggagatatttttgagctcgagtggacctaaccggggcctgttaagacctaaaagggtagtatccccgaggatgaaccgggaaacaaccaaaaggaaacggtcaacaagccggatgggcagccatttcagtaagaacatggacagcccaaaagttgaagtacccaacatctctcgtggtaggacgtgcaccttcacaagtaaaaagaaaacataattagcaatacagcagataaataatttggatgagaaaatcatattattatctattagtttatcatgaataataatattaagagactgtttttcttttcttttgtgagaatgtttgcgcgtgctcgtgacaatcccaataaagttgttgttctcttagtttttattctttgaaaatgttataaaaataatatttatgtattaaagaaattaggtaaacctctttattcatataaaaactatattaacaaattgttggaacttgaagtcacaagggcctaaaagacggaataaaatcttaaattaggataataccagcctttgtattttcccgtaaattttgaattttctaaacagattaaataataagaatatcaaactgaaaaagcaaaagaaattttgatacttttaaaagaattactgtaaaggcaaaaaattggaaaatatttgtgcagattatttctctgaaattatcagccaattaataaagaatggtaattaaacttccaaagaagatcaatattagtctagatatatttgtatataatttggtttccttaagaattttgtaacaatgaaatcttttttttttgtaacaatgaaatctaaaaatcactttttatcgataacagtaaaaaaaaaatctttaagctatgcatataattatattatatatattttcttcaaaaatatgagtgttcatttaatcaagtaatattttccataatattaaacatgaagtttttttcttctaaaactcttttaacgagaacatcttaaagcgctgtaaaaaaaagaacctcttaaaacatatttgtggaacagaatttagtacaagcttatactattaaatgaattatgaatctattatattgatcggataatacttagaatacacacataatcctgaaaattctaaaaatctagaaaacaaaaagcaaaagtttgtaaaaaagtaggtaatatctttgagttaagaatagaaaaacaatcagaagatcaacttgaatgaaaaagcttttcaagattttgttttttagcaatagaagccataaaacatgaaggagcaaaaatatcgaaaacgcatgagaaaaggataatataatctccacaatactttctattttaaaaaaatcaagaaaccgaaaaagcaaaaaaaaaaaaaaaaaaaagaaactcacagcgtctctgacaacgagagaaggctgagcaccgaagttgcagagatccaaacaaacctccataccggagtttccacatccgacgacaagaaccctttttccggcgaaatctccaccggttttataatgacacgtgtgcttaactaccccggcggctgcaaacttatccatcccctcaaacctaggtaccaccggctccgcattctcccccgtcgccgccactaaccaccgacaaacatactccgtcgtgccttcttctcccacgctagtcacgcgccacatcccaaggttttcatcaaacgcagccgactcaaccgtttggttaaactccggctttatgtcaaacctccgagcgtagtcctcaaggtactcgatgaactgttgcttcgtcgggtaggtagggaaatctccggggaagggtataatcggaagttcacagaattgtttaggaaggtgaagatgaagacggtcataagtcttgagctgccatagtgatgctatacagtttgatctctctagtagtacggacgtgatacctctctcttttaaacatgctgccgtggctagtcccgacggtccggcgcctacgatcaccggaccggtgacgacgcagatacgacgcggtgacgtcatgccgcggtggtcatgtgctagtttaccttccatctctctcttccaacagaaatccatcaagaaaataacttcttcttggttctctctcttggctgttatctatatatatatagagagaaagagacttttggtgtaataagtacgtattggttaagagaatacgagaagggtttgtagtatagaagtagtggtggtggtggtgacactaattaagaacaaaggacagaaagaacaatttgacattgatggcatatggagtaagtaaaaaaaaaaagagagatggtaaaaaaaaaagttttagttaagtaaaagtatttataatggattttttgaagagaaatattctctaaagatcggaatcaaagaggttagggtttggattgaatctgctgaaaaggagggagagaaagagagagatcttatccaaatgagaagaatgagtaaagagagtgagagagataagcgttgtgtttgtgttttgatgagagtgtaaaccggaggatgatcagagaactacgggtctcttaaatcgccattcaaacttataggaaagagagagagagattgttagttttgatgtgactatctctcatgtgtgattgattatgtgtatttatataattatgagtgtgtatatattatatatgtgtgaaaaatggttaagaaagtttatatatttaatggagttcccttttgaatttcccacctgtaagattttggtgttccactatacttttgactctttctttaccttatggaaatctcaaagattgatgtaagtaatatttttgttttcttatgatcaaccaatggctgcatactatgagtttatttttaattaatatgagtttagtaaatagagtagattaattgtatatttttctaggtatgtcagatgaatagctaaatagccgaatagcggaataactgaatagttattagctaaacgaattgaactagagaatagtttcgtaaaataattataaaacactaaaaatctagttttagtagaataatcacattttgttttctcaactaccattacaattacgtttggtcattaaatcattttgcatgtgaattacattagtataagtactcgatattctgcagattagaccagatttcagtttggaatctaacgattatattagattttttaaaataagatatttataaaatgcacttacaaataaaaagatatataaaccatccatacatcaaactaagcatcgaaaataacggtatataattataaaactctaaaactaattctattacataaattttatgaatattgtgaatagtaaataaaataatgacatttccaaaatgtgaacaagtggtataccattcaaaccatgttgtttatatttttttttgtaattcatttaacaatgtaaaatattcaagcatagtgcctatttagagaaatgggtgcaattagagtaagacatctataaattaatactcgataaataataatcattataaattagttattttttttggtttcgattaggcttgtgtaatttttacacaattcaataaaaaaataggataataattttcttttgaaatttttattaaatatatagttctgtcagtattgataaattatataaacttttaatacatatacacatatatataagtatatcttatatttcatatatatataattattctattaattatttgtgaaaatgactctaaatactgtttttttttttttctaaatttgcagtaatttttggtgagttcatttctattatttttactatatcggaaaggaaacaatttgtgttgtttttttagattttaataaaataagttcttatatgtaatttgattgtagaaggatattgattataacagaaaattgttttttacatatattgtttttaaagaattacaaaaaattagtcaaatctctttataaattaatagaatttcagggttccaataatattattaggttttattgtagtattagggtggacgcaagaaaagattggaaatcaaataaaggaaactgagaccttgtgttttggaaatcaatcaacttcaataaaaaatctgacaagttttttgaaaccatgagtactcgttccattgagtaatttatcatatattcatatatatagtgagtaaaagcgattatgccacaccaatgaccaaacataacatcgcccaacgagagaatgtgaagctcacattgtagcgtctagtttctctttaacacccttaaatgtctaacatatttctgtcatcatgaagttgtaagacccatcatgttttactagtgcactatacatcagcaaaccacgaaccataaaaaatgcatctgctcttaaacaaaggtatgaatatatatgctgatcctctctaaagtaggccgtgaataaaatttcacattccttaggtgcaatctcaaccttatgttgatgagagattcgttaccttcaaagagtcgtttactcgtttctcatgtctggcctttaaaatgaaacacaatctaaggaaagaccatcatcacttgattagttacgtagttttagatcctatgcaatttaagtgtttgtttaaatatctgaaataatcaaagaacgtattcttctttagccaatgcaaattattgttatggcggtttgtaaactgatcaaacatgaacttaatgcttatttaatttcttgaattcaaatgacgatttagagaatttatagattttttggggttttaatgttaatattttataccaactagaatttgttactagctaaagctagtctacccattacgataactaaaaagagacatgttcaaaaaaaaaaaaaaatcagtacaaccgaaatagaattactgcatgctgtatacttcattttacatttagacgagcgtatgccaatatttaatacttaaaataaaatgtaaatttctaaaataattcgactttacacgtaaatgataaaagcatataccatttgataaattagatattcatcatataaaacaaaaacatgttataaaaatttaacggtttctacaatgtttaaatcacataaataaaactgttgaaaatgtgcttgaacctattttactttactaggtcattttcttaattatcatctctaccaccatataatacaatttctcaaatatagatagtgatagctcattgtacttactcaaacgtagaggtaaacccatatgaagtgtcgtgtctcgccagccacatagatcgtacatttggcaactttgtacttcatttcatatgctttctttttccaaatggtaccattttatatacattctttttgcccctcctcaataatcaattttattgctaagcttttattgggtgtgtatggacattattctaacattttctttagatttatgtcaagggagtccttgctttatttttcaaaaagatgtcacaaaaataataataaatctaaggtggttgatgagtgattaatcatgagtaacagtattagaagtttttggctttaattagaaaatctagcacgacgtatgtgatttttctttatgttttttgcacaaacgatatatatatatgattaataataatataaatatcaaacttactgtaagtatttatatgaaaaattgttaagaactacacaatgtattagtgtgccaactacacaataatataaatatcaaacttaaaaaagagtaagttattatatataggataatattatgaatatctgtaccaatctaattgccgaattaaatcatcgcagattttagtgtatatttaggatagagagtagggaaaatatttaatctaatacatgcatgttgaaacaatagaggttattttgatcgagtaattgacttgaagtaagactaatgtagaaaataatataaattccatatatattggaattttatatccatgtatatatgatacaccaaatatatttaaaattggtatattatagtatatcaaaataaagccatacaaactttaggaaggtataccaaattcgttatattgcatgatgatcaattggtaaactaaaatagtttaaaaggataccaaattcgttatattgcatgtcgactaattggtaacgtaaacaatataaaaggataccaaattcgtacacaattttaaccttattggcatcctcttttgctatttaaatggttcttccatttggttaatatatatttacaaaattttcgtcatttcggatgtcatgtcgccatgagagatagagagacttcattggatgtggatatgagtggagtaaagatcccaagcaagacaaaaatataaatacctaatcctatttgtttaattgaccacttcgagtgttaacgtaattaatctaataacatcacccagttgaaaatctagcaacctacccaaccatgtaccttgtacatgtgtttatttacgtttatattttttcaaataaataaaacattgtttaaatagatataaacaattcatctatgtagcctaggcaccatgccgtgggctgtaaattcttacaaaatttgctgttttcttaaaatgttgatatatatcagtctatgacatataaggtctcatgaaatgtattttgatataattatataaagcagtgcaatataataacataagaatacaactatataatttaatcaaactgatatctgaaaaggctatgggaactgacttcaagatcaataaaaagtaaaaaggagacaacgttaataggctttgtaatccctataatgtatcataggctttgtagtgcctatgtagcctaggcgttaaaattgtctttacgcgtcggtttaaaccgtcttctttatagatttacttatgcaatcagagtatcacgaaactatatactaaagtgacgctatagtgcaactttaataaccctagagaacattataaaagaaataatattctaaagtgtctcgctccaattggtaatactttaaggatagtggaaatgtggaataaaacagaattagtatatatacgtagaacggacctccttccgtcaaatttaacagaataattacatgcagatgttttttttagtaggaagtttaaattatatattctcaatttttcctttttacctatcattataactagaagcataaagatgtgcatacatttgacgaaatacatgaaccattcagaaaattcaacaaaatcttgtgtagacgttttgaaaaacatttcaacttacacgagcattttcatttgtagcttttttcccacttttgtttcgattgtcagtctgcatgttcaacaaagaaaaaagaacaacatgattctcctctacattgcctatcagcctatagcttgatccggaatgagagaggttcactttagtagtgatcgaagttgtttaggagagtgtctatacaaaacccatgggtcatgggccatgactaccaataaaatgttttcaagacttcccaaaatacccaatgatctagcattttttgaaggatcatctacaacaagctccttaagagaagaaacactatatctaaatagtggaaagacgcaaaaaattggtgcacttgaacatcctctagcatgccaaatatccttcctctagactaaccttgattttagatgaccatgattctcgtctcggatactccgaagattataaatgaaactgacttgatccgcataagacactagaatgaactgatcaattttttcgaaaattctatgtgttgatatcgataacttctattcgttctcacgccttgttccatgagaggattgttacaatgagacttaaatatggcaatcttggtttctcatctctgatttgtttttgttcaacaaagttatagatttttgacacatatccttcatatggaagacatatggaagacatatgccatatatttccaaaaaaaaataaaaaatattcatactcaaaatctataactttggtcccatgcaccttcaaagtttgatgaatatgacatcaagattatgcctaaatagttgatttttcatacttttgccaattgtgatactatatgttatatatatatccgtcagacattggacccataactaatacatgattattaacttaatctaaaataaaactttaatgatcatatatgataagcttaccgattgtgccgtgagagagagggctgatatattttggcggtccatgttttagtaacgatcttcattatttttcctttgcatcattctattttatctaacttcaagctcctgcgatgaatattatatttgtcaactcatttaacctccttagtcataacatgtttaattttgaatttatatacaaatacaattaagatggtgtgtctacaatcctttgcccactaacctccactttaactaatagtatccctgttgtctttttttttttgttttgctctgctttttcgctcacgagacattcgtggggaagaatgacttctggttttaaatcaataattaaagggaatttcacactggccagttcgtttgctttacatagaaataagataaaaggaagaaaaaacaaagtgatgaataattagtcgtgcttagttttctaatagcaaatggggtagctaataattacccaatctgtctaatgattataagattaagtggggttgtgagaaagaagaaagcaaaggtaggaattctaacatgatgaaagaacttatacatgcttaattgaaactttattactttttagttttaattagcttatgcttatctttttttctcagacagtttatgcttgtctctttgatattcttttatctaatttatttgtcgaatattcttctatattatggaatttgatttgtaaaatacaccggagtgttttacataagttgcaatatactaggttaagaaaacaaaaatttgaaatatactaaaatttatagaaattcaaaatgagctatagaatgtaaaatatatcaaaatatcttcaagtaaactaaccattatctacttaattgaaatgatttaactattcatttttaaactaattaaaataatcaaacaattcctgttaatgcaaagtgtctccagaagtattcttccctcttcactcagagatgaaagctttaatttaggttatgaaaatatcatataaaaaaaaatcgattgttagacatttgaaaccgatatcatagaactagtcgcgatagtgcagtcttgggaagaatggtccattttctccaatcaactaatagtatctggattactccgtgttcaattgtttttttttatatgttatatttctcatttgtgtaatactagaatgaatagttttaaaaaaaaataaattatttaacatatggcaaaatctcaaatcaagacttttgacacatatcacgttttcgtgaattaataactctaaaaagtatactttatataataaaatgtaagtatgatgttttaatcaagtacacaaaactatacggctatactaaaatatatttttgggtattaaattctaattagatatataaataaagaaattttatttgattagattttattaaaaaaattatatcaaatccgtgtgagtcaatcctaagaaaattaaacaccatgcacatgactatctttgtcttttgcataacgaaaatgttcattggcctaatttatagtcattgatactgatggacgtacgttaattctctaatattaaacattggattataatttagttggagtcattagcatagatagtagaagatgatgtgtcaaaacaattaatccttcgtccgcatgtacggctacatatatccacgtaatagtcagcgccttgtcaaatggaaaataaaatataatgtagtgtgatgtcaatgggtatataattaatacattggaaacaaaaagaaataaaaatgaatggatgatggttacatttttggtctttctgcaatttacaaaatattcatatcgttgggtagttggaaggtgaggtttgggttttaagctccgaccaatctactcttgccaaattagagctaagagattatgtattgtgtctatcgtttttatttttgttttagtcgaccaattatgtattgttaagtgggtgactactagatcacacttatcctccatttggaaaccttttctaatatgttgaattcgaaaacgttggtaacaattagtcctcatttgaagaaattgcttgaacaaaaaggagaatacatgttaaatatataaagttcatgaattcaacacatcatcttctaaataagaaggttattgtataacccatatctaaccaaattccactatagaatcagtaacattactaaatcgggtttagaatcgtaaccatgtcaatattaataattttgcttatcaaaattgcttatcaaaatcagttaacaagtagtgcaatggctcatatatcttatgtgttagacatgcatctaaccatctatcacttgggcacacagaagttaatcaatattagttgggtattagtgtctcgtacaaaggtgaaagactaaagtaggcaaaaatataatgggctttaaataccaaaggcttatttagctggacaagcagatgaaaagttgaagtgtcgtcgttttacagtcacatctcattcggttaaaaaatcaaaaagaaaaacaaaaacaatgcggtgagcgtggatcgaacacgcgaccttcagatcttcagtctgacgctctcccaactgagctatccccgcttgttgatatttattactttgtatgttatatgtgccattataggtgcactaaacagcaaaagtgattttttgggggtacaatctattattgtaaaagtcaaatatatgcaatgcaagaaatcgtcttgttcacaatccaagaaggtgttgtgttgtttaaagaattaattgtaatactggttaagataatgcaacgcgtagtcgcatagacatagagtgcatcaagaagagtcgatgcctgtcttacgtgacgttaatgcgaaacttaattgggctggcctgggccttctgaaggccctatagattttatcgaccaaagtagaacaaaatagaaaggataaaaaagaaatatttgtggacagcaaacataaatttctccataaaaaatttgtcgtttattttccttatctcaatttctatggaccctatctcttgagaagtgtaaatacaggtggcgtttcttaatcttgaatctgtgaaattagtaattacatttcgttgcagaaaacatatacttttccgacaaaacatggaagatgttaatcaggagaagaagaaagtacctccaatgtctgaaccagaaagatccacaccgattaaggtaacaatatcaagaatctttatcttaaacttgaaccaactttttgaaacatcaacactacaccatgttcttgattttagtttattgaaatcttgataagtcgaatcttgtgtttaaaatgttttttttaagtaatttagagctatgtcccctcgagtccaccttctggtgagcacaaggctttgcttttttgttgcagactacaggaggacagtatcgtttctgcaagtcatgtgttgaaggaagtagttgcaggacagtgaggtcaagaaccaagcttatgaacgttttgatagaacgtggaagacctcacgaggctcaaactgttttcaaaacattggcagagacgggacatagaccgtctttgatcagttacacaactcttttagctgcaatgacggttcagaaacagtatggttccataagctctatagtctctgaggtggaacagagcggaaccaaacttgattctatattcttcaatgctgttattaacgctttctctgagtccggtaacatggaagatgcggtgcaagctctgttgaaaatgaaagaacttggtctaaatccgactacgagtacttacaacactttgattaaagggtatgggattgcaggtaagcctgagagatcatctgagttactggatcttatgttggaagagggcaacgtcgatgttggaccgaatataaggacgtttaatgtgttggtgcaagcctggtgcaagaagaagaaggtggaggaggcgtgggaagtggtgaagaagatggaggagtgtggagttaggccggatacggtgacttataacacgattgcaacttgttatgtgcagaaaggagagaccgtgagagctgagagtgaggtggttgagaagatggttatgaaggagaaggcgaaaccgaacggaagaacgtgtgggattgttgtgggagggtattgcagagaagggagagtgagagatggtttgaggtttgtgcggagaatgaaggaaatgagagtggaagcgaatcttgtggtcttcaattctttgatcaatggctttgttgaagtcatggaccgtgatggtatcgatgaggtaactttaacactcttgttaatgtcttttaatgaagaggttgaattggtaggtaatcaaaaaatgaaagtgcaggttcttaccttgatgaaggagtgtaacgtgaaggcagatgtaatcacgtacagtactgtgatgaacgcttggagctcagctggatacatggagaaagctgcacaagtgtttaaagaaatggttaaagcaggagtcaaaccagacgctcacgcgtacagcattttagctaaagggtacgttagagcaaaagagccaaagaaagcagaggagcttcttgagacattgatagttgaatccaggcctaacgttgtgatcttcaccactgtgattagcgggtggtgtagcaatggaagtatggatgatgcaatgagggttttcaacaagatgtgcaagttcggggtttcgccaaatataaagacgtttgagactctgatgtggggttacctagaggtgaagcaaccatggaaagcagaagaagttttgcagatgatgagaggatgtggtgtaaagcctgagaattctaccttcttgctgttagcagaagcttggcgtgtcgcgggactcactgatgagtcgaacaaagctatcaatgcattgaaatgtaaagacatagagatcgcaaagttagagaagctgtaccaaaaacagtcctctggtagtagttttaacctattgcagattccagtcgggaaacgggagcttccaaccgcaaaagcgatgaatctttctgcttgtaaactcggagctcgagtgccaatcatatgccagaagcagtcccaagcacagtttgggatcagtggacagtttgtacattcttgtacagtgttcttgagctgaaaggacaaaactgaagccagagatttggtttttctattcttctgttgaaatttgagagtcaatactttgagaactctcactatgtgtaaattacaacagaatagtcttgtatataagaaaaagtattgtacagttgctgttttcaataactgcagactcatagatttggagaaagaaataaaactcttaataagcagtaaacatacacaaaccagtgacacaattctgcttcgaaagaagtaatactcacagataggtttagagcctgtctttgcattcaattattgctctaagggaaatttgctgagaagccaaactaagagaacaccaagaagagcacccgagaactgcgcaacgggtctaacagtctgaataattgtcaggaattcattgccaccaaatataaatccacaaaatttagtttctaataatccagttgaagtctgaactgcttcagatacctatgagaatcaatgaactgaaacacatcaccacttgttacataattcccagtaagaaataagactataaccacaatgatgatgtgtgtaaatgttgagagactcttaccctcttcataacaaactgacccaatataagaacttcaagaaatttgctccaaccccgagacatctaacaaaacagttttaaaagaagtcctgatgatagatttacaagcacttgaaacaaggagagaagagaactagagtactaccttgacaaggacactgatcacaaataacccgaaaacagctcccgaggctccagaaaaaaatgaatttggcggtaaagtgaaccaagaaaccatgttagctccaacaccagtaaacaagtaagacaaccacaaaccaaagtttcctttctcttcttcaacaatctttcctgttaaccacagaaccattcccattgtcttattaactccgaatcgataaactagatagagtcaaaactatgagaaaatcttgaactctcaccaaagatgtacaagagaaaaagattgctggacagatggttcctagaatcatagatatatataagccagagaaaaacgttaacatcagccagagaaagaacttagcaaaaagtaagcagagagctctcaccagttagcatgacagaatgttgcagtcacaaactggtaccataccggaaaatcgctagacaaatacatcgatttgatcccgcgaacctatatcgaataaataacttttttctaaacgtatgataccaatgtgaaaaacacctaacaaaccaatgcttcacactaaaaaaagaaaaaaaatcctacaagtacctgatagaagtgttgagctataaatatggcaagattgataagtatgatcaagaatattccatttgcttggtttagtggtttctgtttgtcttgtgctttatccaattcaaattgtggtgtgacgtctggaaaattttcttggacttttacaagtgtaaaggaaacatgatggaaaaatcgaattcgaggttaaaaaatctcaccggattcgctggaacgagatctgacgaaggtgagaggacgaaagacggtggagttagttgagttgagatagaggggagagttggttggcgaagaagctacactgcggcgatgtaatgacggtaatctggaacgaagagaagaagaatgtgggagggagagatagtgacggtgaagctgaaggtgaaggtgaagctgagacatttgagaactcaaatctttgatcagacttggacttgcttcttcaaaaatatgcgttgactgaagttgttgtatgctttaagacaatgattttattaattaaaagtaagatctaacagattatagaaatcaaaaagtaagctcaacaactacatccacttacttctgcgtatgcttagtggcattggtaaaccaatgagagtaacatagacaaactagcgacagaattctatagcaaagactactcacaaaggctcggtttagagaccgttcttcagtttttttacaaggatattttgtcaatctatcaatcgtttcatctaccttgcattcactggacagctagtatgttccttacacgaaaagttttgtctcgtcatttttacgaggactttttaacgtcttgatccatagatgccgaaggaaatttgctgagaagccaaactaaaacaaccccaacaagagcaccagagagatgcgcaatgtgattaacagtttgtaaagagtatccaccatatatagttcctgataatccagccgacgcctgagctgcttccattacctattcagatcaattaactaaacagttatcgtccctgaattcgaagagcttctatattgcatacatcatcagacattttctctcatatattgtataaaaacctcattatactcataagaagatgggactgtaagccggaatacggttataacggtagtgatgctgtgagtaaattttgagaaaatcttaccctctcaataacgaactgacccaatataagaacttcaaggattttcctccaatcccaagacatctagacaatcaaaagaagttgaatattagcaagatattactgaggagtttgatttacaaggagagaagaaaactacagtaccttgacgaggacactgatagcaaataacccaaaaacagctcccgaggcaccaacagaaacagcatttctcggtaaaactaaccaagaaacaaggttagctccaacaccagtgaacaagtaggagagccacaaaccaaagtttccttcttcttcttcaacaagctttcctgattcccaaatgtgtccattagctctctgaatcgataaactagctagaaattcaaactatgagaaaatcttgaactctcaccaaatatgtacaagaaaaaaagattgctggagagatggttcctagaatcatacatgatacataaaaaaaaaaccaagaatcaggagaaacatcaacataagccacagagaaaaaaactatcataagtgttgttcgtttggtagtcacaggatgcctgcgactgcgactgaaagttgatcgtttgacagtcgcaagatcctgcaactaatcgcgcgatcaatcgctgcggcttgcgactgaattttttgatcgcatgaaaaaagagcgacgcggctttttaaatggcgattaatcgcagcgattggtaaacgaacaacatcctgcgattttaaaatcgcaatcgcaatcgcagccacagccacagccgctagcgattatgaaacgaacagtgccaaagtaaaaaagaaagaagagagctctctcaccagttagcatgacagaatgtagccgtcacaaactgataccatgccggaaaattgtgatacaaatacaaagatttgatcccacgaacctaaatcgaataaacaatataaaacgtatgataagataagcacgtcacaatccaaagagatgggattacacgaataacgttttacagtgtagatgattgatatctaaagacaagctt

SEQ ID NO: 121 - DNA, 157000 bp, Arabidopsis thaliana
gaattcttggagcctgtccagctgatcatgctccttgcttgttttcagtactgaaccttcgcagagttgttaacaagcctttcaaattctattgccacattgtggatcatcctgactactcagctattgtggatcatgaatggtcggctggtacaatctctggctcttgccagtttaagcttcatcgtgctttaaagttgccgaaaccgtgcatgcgtagcttgaacagaactcatttcagtgggatcaccacaagagttaaagagaaagcagaggaagttgttgctctacaaagaagaattttatgttctccatctcctactcttgctcgtgaggagaatattgcctctgaggaatggaataagctgttggtcgcagaggagaaattttttatgcaaaagtctcgtgttaattagatgcaccttggagataggaactcttcttatttccacaagatggtcatacaaaggaattcgcagaatcacattcatttctttactgatgtggatggtactaaaatcacttcccctgtggaaatccatcgccatgctgttgagtatttcagatcagttcttgggactactgacctaccttcatctccggttactcttgagtacttgcaggatctcctgccgttcagatgctctccctctcaggctgaaggcttactgtgtgaggttaaggaagctaagattcgtgaaattctctttgccatgccttctaataaggctccggggccagatggctaccctgccgaattctacaaaactgcctggtccactgttggccatgacttagtccttgttattcaagagttttttcgcaatggtcgtcttctcaaagatttgaacactacgatcattgctctaattccaaagactcctgcagcttccgctctcgcagactttcggcctataagctgctgtaatctggcctacaagatcatttcgaatattctggccactcgcctcagacctttgctgctggaatgcatttctcctaacctaactgcctttctgagtgggagaagtcttggtgaaaatgtacttctggctttagaacttatacgcaggtatgacaaggtttcttgtcctcgaagctctctcctcaaagtggatattaggaagacatttgatacggtgtgctgggacttcgttctcaaacttctcgaagctcagaattttccgcctctgtttatctcttggatcaaagaatgcatttcttcgccgcgtttctctatcgccatcaatggtgagttagcgggtttctttgaaggtatgaaggggctaaggcagggagattgtatctctccatatctgtttattatggtcatggaggttttatctagaatgctggacaaagggacagagcagggcaagttttcggcgcacccactttgtttatctcctcgcttgactcatctagctttcgctgatgacctcctggttttctcggatggctcccacagttctcttcttggtatcagtgagattttgcgtctcttccattctttctcgggattggatatgaatcctgcaaagtctgagctttttctgggcgggtttgatgatgtggaagctataatggtctctgatctgcttgaggttaggttggattcattcccgacgcgttatctcggtcttccgttgaaccctacaaagctatctcttgctacccttcaaccttttttacagaagatcactggtcatcttcactcttggactaccaagtttttatcttacgctgggaaaattcgccttatagtctctgtcatctatggaaaggtgaatttttggagccaagtttttgtcttgtctaagggtttctacaagaaagttgatgctctctgctcagcttttctctgaaaaatgcctccaccattgcaagaggtggtgtcatagttgcttggaaggacatttgtaaaacaaaagaggagggtgggttgggtatccggtctcttgaagattttgctgtggttttcagactaaaacaagtgtggtatctgttttctaggcctgagactttgtgggttaagtggttggatcacaacatctttggtcgtcggaactattggctaatggaaccttctcctcgtctcttttggacgataaggaagatgcttgatttaaagtctctcttcaagagtatgatcatatgccaattacgtaatgggctgaaagcctccttctggtttgattcctggacccctctgggtcccttgattgatctctttggtaattcgggtcctagggagctgcgtattcaaagaaatgctactgtttgggaggccactagagatggtcaatggcactttcctaatgctcgttctccccatgcggagcagctgcaggtttgtttgtcatctgttgaccctccttctccctctagaggttctgattggtatcaatggaagcagccttctgatgctttctctgaaagattttcttctaagggaacttggacgcagattcgtctttcttctcctcatgtgccttggagtaaagtggtttggttcaaggaggctgttccaagattttccttcatccattggttagcagtgcaaggaaggctcaacactagagacaggttgcggcaatggggaatggacgtccctaactcctgtgttttttgttcttcaggtttggactctcatgatcacctgttttttgcatgcgatttctctagatctgtttgggtcagtctggctgaaaagtttgctgcgaaccccccttcctctttagctactgctgcaacgtgggttttgagtgttcaatctacaccatctcactttgcgagtaggattctaaagctccttttgcaaacctcgatctatatgatatggagagagcggaacagaaggattttcacgactgaagctaactccatcgcttctactaagattctgcttgaccgctctatgcgcaatcgactcatcttcttctcgccggaggataccgctaccagaatatctctcttgggtttctactttggttgtatctctagctcaccttaggtgtggctaagctcattagtatctatgtaacgtgttccattagtctctctttttaagagctcggtatgtttttgagttttcattgtacaatgtaaaaccttttttatttggtataaagtttaacattaaacccaaaaaaaaaaaactctattaaacaagttcacaaaaaaaaaaaatcagtatgatgaactattgagatagtaaatctctcaagtaatccaaaacacaacatggtcctgtctgcatctaaatcacacaaaaaaaactacagtcaaatgtaaaatatatgaaccttaactcaagaaacttttaccatttctggattttggatgttcaaattagaaagaaatcgttaattcaggaatataagaaatcaaacagatctagcaagagtatatagcaaagccatctctctagatacttcttcagaattcaagccgagaaaagcaaaaggaaagttcaataagattgtgtacaattattaatcattatctaatacttcctcttaggggtgtcaaaatgggtcaaaattcatgggtcaactcaactcaactcaacccatgaatcctaatgagttgaaaattttgactcaaatgagttaatgagtcaaatgagttgatgagtcaattggtttgatgagtaaaatgagttgggttgtaatggttaatggtttcaatggtttacccaattaacccatcaagttttgtaaaattcaattaaaccaactaaaatctctaaaccaatgtcaatttaagtttaaccaacacatctaaaccaatttaataaaattaatatttttccaaatttcttaaatatacaagcgatgaaattgagaaaaagtaaactcgtaatttttccaccaaaaaacataaacccgtgattttcccgccaaaaacgtaaacccgtgattttcccgccaaaaacgtaaacccgagattttcccgccaaaaacgtaaatccataaatttcccgccaaaaacttaaacccgtaattttcccgccaaaaatgtaaacccgtgattttcccgccaaaaacgtaaatccgtgatttttccgccaaaaacgtaaacccgagattttcccgccaaaaacgtcaacccgtagttttcccgccaaaaatgtaaacccgagattttcccgccaaaaacgtaaatccataattttcccgccaaaaacgtaaacccgtaattttcctgccaaaaatgtaaacccgtgattttcccgccaaaaacgtaaatccgtgattttcccgccaaaaacgtgaacccttgattttcccgccaaaaacgtaaatccgtaatttttgcgccaaaaacgtaagcctataattttccgctaaaaatgtaaacccgtgattttcccaccaaaaacgtaaacctataattttccgtcaaaaacgtaaacccgtgattttcccaccaaaaacgtaaacccgtaaaaaatgaaatccgtaaatatcctaagtttgatgataatgaattaataatgataattatttattattgttttataagaataattaattaaattattacttaaatgggttaacccatttaacaactcaacccatcaaattaaatgagttatgggttgacccaacccatttaacaaaatgggttgggtcaacccataactcatttaaccctaaactcatttgattatgagttgaattgagttgggttacccattttgacacccctacttcctctgtttctatataaatgtagtttaagggtttttattttttttcaatttaaatgttgttttcaactttctatgcaaataataaatgtatttaatattctttaacaaataatatttaatcatctatttttttattggttgaattggttataataaatgatgtttttatataaaagaggtaaattaaatgagatttttatgatttcttaatttctgtgtaaaaaccttaaactacaactaatatgaaacagagggagtaataaagaataaatatatatctacacgaacaaatactttttaattaaatattagagaatctaataagctttacaaaaaaatgtcgacgacaaagatcaacgagaatatttaaggcggtttcaccttatattcaagattcaagtcacaagcgaatccaaaatgctacacttccaaagactggttttctcgacaaaattttgagccctctaaacttactagactgaatgattcgaggtaatgtggcctcacgaaatagaacaactcctaaagtattgtaaagcaccagtgtgatcaatgtctaacatatcagaaaacaaaaacactagcaggggaaatatgactttaacgaaactaatccaacggtgtgaatctttaacgaaagcctgaaaccccaacgtgactttatttgcattactaccttgaacaaacaattggagatgttaattaatgtttcaaaataaacaagaaaacaaaaatagagatttatcttttatggtatctatagatctaggttattaaactaaagcaacaaaacaccacaccatagtattataaataccttcaagatagaaaagcgggatcttcaatacagttcctccatccacaaaaaacaactctgttttgagtgtcttcaacctctgttaaacattacaaaaccatataagctcaaatgtggaaaacacataagaaaccacctcggagagaaacaagacgagagaatcgatccgtaccgccaagaaacatatgtaaggaagccaaagccgggttgaacataagttcatcatcaccgaggttacactgtcaagcaccaacaaataaaaattcagagattactattcgttgaatccattatctaaaggattacatatttgcaactataaaacatcacgtaaccctaattaagcaaaaaatcgaaaatcaaacacttgaaacagattcttacaacccattaagccacgcgtagtcgctggaaatagaacgaaaagagtgtagaacgaataagtaacaaaggatcgtagaggtaaaccaaaaagcaagtgttaagaggagagattggctcacgaagcttgagcgtgggaacagaggggaaatgaagagaggtcatcattatcatcgacttcttcaagttgtaattcctcgaaattaagctcaccaatctgcttgatctaaagtctcacttgctcttgaatcttttcgtcgtccatttccctcgagtttcatttacccgccagtagagagagtctcctttagccacatccgcattttctcgggaactttatcgggccggtttatagatccaatacccagcccaactatcacatgttgttaatatatgattatattttaaataataatttcgttacccatttttattatctttttaacttgcaaatcatatgaaaacaacaaatgaattgtattttcacctactttctaataaaattcttcttcaaaatatatcatgaataatcacaaataaaatacactaacaacatataacttcaaaaaataatattataaaaaaaaatccgcggcttggcgcgggtttcgccctagtcttcttaacaatatcttcttgaatttcttcccatgaataaaatgtgaaatttgaaaagtttaagggttaacttcaatgtgttttttcttttgtcgaaagtgtcttagtttctttcagtgacttctctctttactatgtgagtataacgagactgatacataacacattctcagagatttggcttatttcaattatttttttggcatataacaaatatataacatatcattccaataagaaaaccgagcatcaagataaaatcattattctaagagcatccaacaactttaaaaaaaaaaatgtaaaaaagtcattgaatcagcaccatagtgatactgaactcaacttcactaattgttttgactcaaattaactatagcaaaaggcaaaagaaaaaagaaaaaaaacaggggtttcttgcaaaatggatctcaagtaccatccttattctcctcttatttgctcttgtaaacctgcacagaaacctcatcagcttcctcatttggtttaatattgactgcaatctcttattctctcatctcctgcccaatgagaaccttgagaagctcttgtatcacagctgctagatcaaggtccaagcaaacttcagaagcattctcatcttctttacctataattaagcaactaataagcaactttatgcgagaatctaaatagttctttccttgggtatgtcctctgatttggatggtgacgggataaagatttaaatcccgggagtttaacaagaggcacaactgtccacctccctttacgtcgaaatcttgatgtacttctaccatatcatacttgagtcatttcttaaaataaagtcgaaaatattccatgatggtgaccaatttgcataaagagcccaaatattgcccttttttttgggatatatgtgcactagtccttcctttgtcacctattgttcactcgactttatgtgagaatgagttgagagacccgtaattgctacgtttccgaattgagaagcatccactcgtctagtaatacccttatggaccagtgcataccactgtggcatttcgtattcatcataagcagtccaaacctggttttcaataaacaaagcttaagtccgatccgtgtcgaagtcgtaaaaatcagcatatggaacactcataaccacctcattatattcatcctcattaaccatataactagtgttcttgttttcataaatctttactctttttactgcattacatatctttaagttttgaattgtttttgttaagcagcagcaccaactttcttgtcttcacaagaggaactaggccttttaggattataatgggatcggagccttatcaaccgaagcacttccaagcatatttggcctaatctcaacttcgttgtccatctttttgttaaaatagtacacaagatccttgtatgtctttaattagttttgatcttgcagaaagaaaaagattgatcatcaaaaagtggaaagtgggaaaccttttgcacctataacagttttcatcactcaaatatatcctaatcttgaagccattaaaccaactttattctataaccgcaactaattagataaagaacaatttcacatctatgaaaacaaaattgctggaaagaaatatttgaatagttagttttggcgcctcattatatatcaaaatttagattttaagatccaaagatagtgttcccttagatattgaattcttagagaaggaatccatcaaacttgttaagagaaatcactactcttaaactaataagttatgaaaaattgcaaaataatatacggtttgcccacgattgtttgtttcaactttcaaagttaaagatccaaactgaattttgtgcacaaaattaagttctcgttgcatcataaattgagagtagagtttgtgtgtgaaaccagtggagaaacagatttggtttcaaaaaaccttttgctagattttaggatctaaaaaatggaatctaacaaacatctacacacaaatagttccaaacacaattgcgatctaaacacaaatttattatttatttagaaaaggctttagtatgatctcatttcctatcccccaaacatacgctagagaccaaacaaaaagttccctacaatctgatatatataagtgattaatggagaaattgaacatttttctgaaacgttgaagtaagaatttcaaaagttaaaatttatagaatgatgagtgcaagtagtaatgaggattagtacatacatgaaactttttgtggtaaatattacaatgaagtttatattcacaaattttatattctctgaagtttttccttcactcaaaatactgattgtctaatttcaaattattttcatatataacatggttagtttgtaaatatgaataagtttctactgacgtttttattaaaataagttttatcctattttaagcagtcaaagctgtcatctagtcgtcatttgaacccctagcgcctagttggagcctagacgagtgcctagaccgctttttagaacattacttctgggtttaaaatcagtaactatagtctttattggctagcttttaattttgtattacagttgaatgaattgtacgaattagttttgtgttagtaacttccctttactttttttttttcgttttctttaactaacttgggtgattcaagtatggtttgctcgataatgtttgttacatactaagcccaaaattttaagatcaaaagatattgttcttctaaagaatatatttccccttactctatttcaaacttagatgttcacatctaaaaagaaataactactacctaaacaaacaactcatgctaaatctaaataaaaacttgtaataacgaatagacagttttgcgcgtgaaagttgtgacaaatcaaatcagaatagagttttcactttaaagatacctgcataatataatcaatagaatttgcgaaccaaaatctgttgataagtaaaaaaaaaaatattttatgaaaacggatttgggttcaaaaaaaatttcgctagatctaagatctcatgacacctctaaaatggattctaacaaatattgcaaacacaaaggtgtcataacatagaaatgccaaaaaagggttaagagtccaaatctgaaaacttgtgaataagatccaaatgccaaattcagaaaactgtaataaatcatgatataattgaattgatggtttgttcatcaaagttcctcaaaaccgtgccgaaattcgttaaaaataaactcaaatagaccgtttctgccccaaattttgttagatatctaagcttgattcttaccaaaagcaaaaagactagaaaacttttataataaatttaggtttcaaaagaaagcttgttgttagatgtaatctaacaaatagctgcaaagacagagagtctaaacaagtaaaagtctagaaaaataattagttgttatatattcttgtctcttatcaaacatttgatttttttctagttttataaagaaccacaagaaattatgtttcaatgggtagtttgatgacattttatacgttattcatttggttttcgtatgcataaattaatctatagcaatattcttaaaccattagattcacttgaaagacaaaatataatattaacaacaacaacaacaacaataataatacataacattaacaacaacaacaaaccatttacaaaaaaataaaataactcaaaaagaacctcaaattttctcacaacaaaggtttgaaaatagggtaatattagtaactagccaaattagatacacaaattaggaaaatagccgtgcgtcataaaacattagtaaataaacttttttggagtgcgaaataaccaaaataacttggaaagataggcgggaactcgtgagttccgacactaggtggctatatgtagggaacataaacatgcgtaagtaatgagtacccgatttatttataaaacacacgccatttatagatgtctttgttcccttttttttttttgttctataagccacataacttatagatatcaattacagatgcatttgatatttaaaccctaacttataccactagataagtgtaatgatgaggacatcaaactatgtatacatatgtttgctttgtaggcgagttgttattcagtgaagactaacagataaaaaattcattgataattgtaaaatagaacgttatataagaacaactcatgtaatttctctatgtagacgaagtatgaaaacaatgggcttgagttggaaattgtgtattgggcttcatgttattaattcggttatagcctctgcaaagtatcaacttgtagagatcatacattacatggaatgtttggttatagcagtaatcattagtatacaacttgctacataatctggtcgacacattttatttgcgttttgacaatgtgaagagtctgtaaaaaaatattttatacgtatctattgcattaaatgcggcgaaagtgttatatacgagttccaatgttacattgggggaggggtgaaaaaaagtgtaaaaacaacatgttacttataagtataacagaggaggacaacatggtgcactccctagcgtgtcaccattaacttctccactgagaatagagacaacactggtctacagaaacaacaagtgaaacaacaatgttaagaaaatgatatattggaaaaggcatgtctccataatattagttttgcactctatagaaagtagttcacatctgcagacactacataatactacttaagaaaatatagcactactatataaaacatgcaacagatagaaaacacttaaatttgaaagaaaaacatgaatttaagaggaaacttgataggggttattgttaacttttttttgaaaaactttgtttttagagacaaactcagtgtgcttcgaaaaaaggcacatttgttgtttgaaaaataccatattgcccctgtctccttttcccttcttcttcttcatgggtctgttccatttttttctgtccaaatcaatttcttctttattttgcaaagaaacttaaaatcgttttcaattacataatactaaaccctaagatagtatatagggaacccaaacaaccaattttatagatttttttgagaaaaaatccagtttttaattttttatatatatgcatgtatatacatgtgtatttgtgttgttatatcactggatccgaaaatcaactcaaacacatctcgatccctttttaaaggtataaaagcatgaaatctaaaatgaaaacatagtatatagagaaatcaatgactcaaaataacaagcattattatataagaacaccttatagagtagacatagtatgttatctatataaaacacatgaaccagctataaataacatgcagaatatgaacaaacctccttttttttttttaaacccctaaacagacgaaaaagaatccacagagtttgagaaaattctcagatctcgccttatctaacttcatgtagagagattaaaaaaaattgagtgttagtagagaataaataaaaaagaaccaaaacttagatctggacacaatcggtaagaactctgtgcaggatacttatggaagtgtacatgggaagaaatagaagaagacatagatagataatcggaaacccagaactgattcattggcaaagactagattggagaggaggagaacgaattaaaacttctctcacaaacgacgatgagaaaaagaagattagcagctatataaaacacatacaaaaaactataaaacaaataaaataacagagtacttaatggcagaccaaaaggtataaaagcatggaatttaaaatgaaaacatagtatacagagaaaccaatgagacaatataacaagcatcattatacaaaaacaccttatagagtagacataacatgttatttatataaaaaacatgaaccagctataaataacatgcaaaatatgaacaaacctcttgtttcttttaaaaacactagacggacgaagcagaatccacagagtttgaggaaattcccagatctcgccttatctaacttcatgtagagagattatgaaaaaattgagggttagtagagaataaataaaaaaaaatcaaaacttagatctggacacaaacggtgagaaccctatgcaggatacttatgtaagtatacatgggaagacatagaagaagatagagatagaggggaaaaagaaccaaactttagatctggccacaatcgttaatttctatgcaattgaagtataaagaggaagaaatagaagaagatcggcaataaataaacgaaaatcaatggcttaccttaccagattcgtcggcaaggggaggatcagaaattaatacttggattgctaacggcgacaagaacgagaagaaggtttcaaggagacaatcaagttctgggcttgattgaagaagatgagagtaaccgacggtgaacgcaatcgccaacgacggcgctagattttgggaggatattttgcggtgtgaagaaaaaacaagatttttattttctcatatattacttttggtgcgagagaatgaatataatgttagcttctgaatatttcaaatttcaaaccgagaatcatcacgctcccaaatagtgtattgtcccctcaatgtctaaggttatacatgtaataatacatgtgtttccgacagaacattgtatctcatggctatttctttaaaaaaattagatccatgactatttactacatattcccttgaaaataccctaaaacgtattccacttattagtttccgtcgtcacctccttttttcccacgcgcttcttcctcctcaccagacaccgaggtccaagctccaggccatgcctgcatttgtggttgtggttggtggattccaagactacaacaaacaggagttccaattaccattcctggaggcagctctccatcgtcaataggtggcatggccacaggatcagcagcggcggcaacagactctctctttacctcaatgtcatcatcaagcaagaaatcaaagataacagtttgagccactgcggcatcgacattagatttctgtagcgtgactcgtttgctttcctgagcatggagccacgaacgcatcgtgagatccatgataaacatctcacatgctttcgagaggaggattggagcctcactagctatcatagtcacatccggatcatacttcataatcttcttgatacgagttataggaaggtcgtgatttttgaaatctaagttaccttccatctcttttgaccagaaactcttcagttgctcgttacctttcggtggcagctggttgttgccgttgttgttctccataagatttttttcttttttgaagtttctagtgttctaggcttgttatttttttatttgaagatttgcatatataaaggaaaagcttaagcatagattagatatggtgggatagtaagcaggtaaacttttacaacaatgaatcttaacgcatttagtatattgttaagaatatttaatgatattaacattatttgtttgactaacattatttggttattattataagaagaaaaaagaaagtgatttatttttacttaaagtgtatatattataccaattaatagtgttagaaaaaagaaataaagtaaatacaaaactatattttctctataaaattgcaagataattttttgctgtacaaaacttattttgaattatttagttaaaaaatatgttttcaaatgttaaatgtgaaagcataattcatatcattgctcgaacacaaaggagttacatgttgcatctgattggtttagctttctgttagacttcaaaaacatatgatcatcagttcatcacatagatctattacacatcaacaactttctaactagaaatcattacttaagcgttgtccgatcttttttaccggttatagcaaaatattttaccgcagcaattcacttaaaccgattcatttatatggatccaaaacaaaccgctactaaagtttcactgatttttaacattgagattataaacatcaaaaacctacaacagtataaactaaccaacacaagaaaccgcgttgttctttatgttttcagtcccatctaatgcggcaaccacgagcatgaagcgtctcgagcaattccgatgagagcaagaatctgagaggtgcgagaagtttaagcttcttgagcctattgcaacaggctcttagagcaaactcaaacccttctacagtcacacggctcagatgaactaagtcaacgtcttgaacccgactcagattgctcatcaacatgcatagagccgtatcagacaccgagcaattgcacaagtttatctgccaaacaaaacacacaacacaagaatcaaacatgtttccaatagatgcttccagatctccatctataaatgttattttttgtacctgtcgtaggtttttcgagaagtaagcgagcgcccaaaaacccgaatcatcaatattctcgcagagtttaacgtccaagtaacccaatttcttgcagccggacgcaatggctgctaaaccaacaccggttatattctttagccctcgaagttcgaggtgacttagaagttctagctgccggatttgttcaaccccggtgtcagttagttcacagcagtatgatagaatgagtcggttcaagctcttgcaacctcgagataaagctgctaaaccatcatctccaaaaccggcacagctgcactcaaaaaccagaaatcagtaagaaaacgaaacatgtcttgcacatttttcatcaagaatccaccaagaaagtgtaccggtatagatcaagttctagaagcttcgaacatttggaaccaatatggaaaatccctttgtctgagatatttgtgcagagtccaagtttcaatctttgaagattcgaacacttcgagatatattctagccctgcggtcccaacggaacaaaaaaccgtaagataccaaagatgacaatatctaaaacacaaacggaggtttgagttcacatatatctttctattacctctgtcatttacaccataacagtcagtaagatcaagttcttgaacaagcatggagtaacatccaagcgattgaagacctttctcagttatcaaatgacaagactctaactttaaagtccctagattccggcaagactgagctacagcagagatggctacatccgtcacgaatccgcaacacgccagatttaatgttttcaggtttaagcagttgcgtgcaagacttatcatcccaatatccgtcacatcaacacatctgctcagtccaatctccattaaagatctacagctagagcttaaacttacaagagaggaatcagaaacatgagctccatcaatccatatagtcttgagatgcttcaaacctttgatgtactttaagaagctaccagagacttcctgtgaatcacaaagattagcagagaacactatcgagtaactagactaattcaaggtctcaatcgcaaacttaccgatacacagtgactggctttaagaagttgaatatcaggatggcctctgactatagagatcaagccagacaaactcacacggtcacacctagtgacatcaacctcctgtttatagcacttaaacatttcaaaaatcgaatattgaatccataaaagcttagtgtgtgaagaaggcaaagtaagtacctgtaatgaaggagaaccattctctagaaactgtaacccaccatcatctatcaaaggacaacttaccatatctaaaacctcaagctttaccagcaacgctatagaccggatcgaatcatttgtgatctgaatcaaattcacaaacaaatctcacatcaatcactacaaaggtagaaactttgaatccaatctccataaagttttcaaatttatgacatttaccttaagataagagacatctagagatttcaatcctttgcaaatcttacaaagaagatcaataccaagatcagagatctccatacaccatttcaagctaatcttattcagattactacatccaacaacaatcctcgctaatccaacatcgcttaagctcaaacacttatccatcttcagctctctcagccccgtcgcagacgacaacgcagccgcttctctatcgccgaatccccagcaatgagacacgtcgacgcgctctaaagcgtgacacatacgcgccaacgtctcaagtcctctagctcgaactgcggtggaacggcttaagttcagtgacttaatgcctaacgttgaaatggcgccgtctaatgctaaacgtaaaacgacatcgtcgtcgagttttggacagacggagaggtcgagggaagagaggtttgggtatttgaagagaagcgtcgggagaaattcgacccggaggattcggatcgtggtacgagtcaatgagtcgactcggaggaagtctttgctgattaaacgccatgttttccgacacggtgggtctagacattcgtagactcggacaagaagatcttccgacaaaacggataaaattgatggtgacgtcgacatttttgcaacagaaccagaaataaacacacaacaacaacaaaaagaaactttttaaggagaaagaaatgtgttttctctaatggattcgaaatcggaaaaatttgaagctttttttttaagtcggaataaagagaaacacagctcggagatagagtagagagtggtgaaccggtttttctaagatccgaattgggttaacggtttgcagtttcgggttcatcacgccgattagtcggagactttccggtgggaaaaaacaaaaccgaacctctctctaaatttttattttttctgatatataaaggagaagaaaaaaatgaggaagacgaagaagaagaaagaagcgtgacaggaataacacgaaatgacgaaaacacccctaatcttactagtacggaaacaatgtgtttggtttttggagtttgagatctttacgcgtggttaattatccacgtggatatatattagtggttagttatggaggctttattgttaggagcagaggatttggagcaggtgattattacataactgtaccgaagttaggtctgcaccacttgcgggacccacgtaacgtgcatcgaccgtacctatctgtttgacccaaaactatatgataaaaatcgaaaatattagtttgtccaaaaaagcatatattaaaaaataaatatattgaagaaatcatattcgtttgtctgacgtggatagtacgcgacatcgtcgtggcagatcacaaattgctattttaaaaacgatgtcgtgtaaacagttatctaaaaaagttttgtgaaaaaaaaaacctcaaagacgtttatttttataattttatatatatatatgtacgtctaaaaagtacaaaataattttataatttaaaataatatataatataatctttttttattattattattataaaattttaataaataatatatcaaatcaaaattttcgagataaaaaatttagttatatttttaaaatttttaaaaataaatatatataatggtgaaaacgtatataaaattataaaaatgagttatatacttatattatattttatattggattttatataaagattttgtatttttcatatataaaaggtaaaattacgtaaacaataattaataaatattttaaatttaatctgaaaattttgttggaaagtttgcatttgcaacgtcacaagtaacagcatagaccatgctttcacgttgggatgtttcgttgaagtattaagataaggttagaaagttttatatttactatttattgcatgcacctattattgataagttctaacaaaagtaattaatacttttctcagttttaaaacttaaatatttacatactcaaatttatgtacttcgtgtacggatcggatcgtcagaagtttgacattttctttagacagacatgcatacgtaaccaaacttctatctggattgttgaaaatttaaaatgtagatatacttctttttcgtaatacgttagcataattattgaaaaaactcttaaatttgtctggcaatttttatttttcacctcaaaaaatataaaataatcttatgaagtttaaaataatacgtaatatacttttattttactattatcaaattttaaatttttgatagataatatatcaaattgaaccccttaagatgaagagttcaacaatatcttaaaaacaaatatatatgatcgtgaaaatggttacaatatatataaaattataaaaatatgatatattgcttattattttgaatttcataggattgatttacattttttaaactttaatagacgatttttaagtttcattttgcacaaaatctttacatatcagtataaatcgcttctcatttgttatttattactgataaaataaatttgtggactgatctttaagtttattcattagtcacatatgttgctaatgactactaagtttgtatttatcctaaaaaataaattcattatccttcaaattttattaagacgcctgtaactttatttgtattatatacatatatatctatgtggctgctagtctactattgaaaatcttatttaaattaatgtgtgcttcaacaggagatagaactaaatatgagtttatatattaattagagaaactaattaaaactcatatttgttccaccacctgtcaatacacacttaatctcaagaataagatagtccgtacgtttaatatatatctttaacttttatatagttgtcttatatttataatttttgtacaggtaatataggctggccatttatacgatgctcaatatatatcttggtttataatgtcactcatgaaaaggtgactggttgagactttttcaatatctagtttatcactaaaatatttaaataatgattgaacggatgatatctgggaaattaatatgcgattagttggcactttcctgtctcttattcgattttcagcctcaggtcaatattcgattttacgttcatgtaagttaatgtttcaaccactccaaccttaaaaggttgcgtttcaatcaactacactttaaatttcgttgatttgaatagcctttcatgttttaatatagtaacaaaaaaaaggagtatgaaaagttataaacaattgatatgttttattttcaccaaaaatcttgagagattccaaaaatacttctaatatatggttttattttcattgatacgttcaggttgctaaaaagactaaaaagatatgttaatgtatccttgaaaaaatatttgattatctcaagttcatgtatgtgttcaacaattaatgtatgtgcataaagaacgaaaaattgctttttttttcttagaaacgaatgacataaactttattttagaaaacatcttgaaatgttttgcgagttgagtctcttagggacagcataaaaagagccatatgtaacatatagactggtccgagggaatgcgtatttaagttttaaaaatcatatagtgtatccatagattagatgttaaaacatatatatatatagtttattgtatattattggttgtgatatacctgaccagaataagatctacccgaagtgagcctagaaaaaaagatgacgacaaaggtgaaagacgtaccttgatctacaagttgcgagattctcgcttctcacgttcttctacttcgttgacttcatttcattgaccttagacagtgaggcttgtagagaaccaatgggccaagattgtttatccgtctatcctctctttgttatttattataaaaaatcttaatttgcgatagatttttgaaaaaatatataaagaagattatgaaccgtggagatatacgagcgtggatatgatgatgtgtttcctttcgtatgatatataacattgattgttttggaacaaggtgaagagttgtggggattttatatagggaaacttatgatgatgatgatcacattttgttggtcttagagtacatcgaatatgtagattttgttcatatgatgacatcaaatgcaaatatgagttcattgtctttccaaacaaagaatatgaatctatgctaatgtgtcacctcaaatattatggtccatgtaaaattttcaaagtaattaattaccatacattatatatgtccacctatatgttgattttggtctactgctccaatttgcaatcgaatatagtacatatgttctctacttgccatttttttgtcaccatattatgtgtttaggttagagtcatcatctattgatttaggttcttgtcctcgcagcgccgattttgtaccgttggttgactgaattaaatagattaatcggattaaacccgctagttaaccatcacatttggcctttgccattgtagcctcacaacttaggcaattttaggatttgattggttaatagataggtgcaaatgcaagatcttttggtagcaatggttgctgttttaagagctataaaaatatttatttgattggtataagagttgaaaatatgtgtgtttgtgggatgttgttatattttgttatgggtgagtttaaaactaatataataaaatatgctatctaattatactaaatcgacagtcaatttttcaataactgatgtattctccttttgacatctggcataagtctcaatttttgatgttttactttcacacaatatgttaatatttgcattcctaaaaacttttatttttactcttccacgatctccatgactacaacagttgcaaactaattagcaaagaagaagaaactgtttccttcttgcaattgattgatcaccttatttatacggtttcatcttctttgcaattagtttactttcttggcgtaaagttggtcgctgaaatatactattctaccatttttcgcccacttttcttcatcaaatcaaaatttctcatcattgctgatcaagaagagaacgagaacagagttattctgaaacacgataacagaagcattctaaaacacaataacagagtgaattgcagccagcaatgatgaaacacgagaacgagagtgattctagcttttaaaatcaaattatgtcgctgcatatatttttaaggtatcaaatttgtatcattcaagatttgtatatctcttcgttctgcatttgttgttctgggtctcaattttagtatcatttagatataaattgtgaatatattgatgttgtagtatcaatggagacaagctagaagaaacaagaatgtttgggaaagagattgagaagactgaaaaaggtgaagaagacaaaagacctaattcagcttcagacacaactcaatacggtgtcgttgagtcagctctaccaaatcagatgaccaagcccaataacatggtctggaggcccaaagcagaaaagcagcccatttagcccatccaagagcaacggtcacctgcaaaacaagaagacaaaattaaggaagcttcaaggaaattgctaaaagatgaaagcaattccagctgtccaagtcaagacctaatcttgactaataggtttgaatgtctagagagtgaggacctagcttaacctaatctagagactatataagagagtctaatgtaatcacaacattaagagagaaataagatggaaaatatttcagtctccttcacatactatctctaaagcttactactttcatggtatcagagccatggattcatcaatccagctctattctcatccggttctacatatctcaaactgtgttacagtccaactaaatgaaagaaattaccttctttggaagacacagtttgaatcctttctctctggccaaagtctcctggggtttgtcaatggtgctattaaacctcctccagtcgacaacactctgactcacattgatggtctcaccacagaggttccgaatccagactatcaagcatggctgaggtcggatcaagtggtgcgagcttggcttctaggctctctgtctgaagatattctgcgagaggttgtccacaccaccacggctcaggatgtttggactactctagctctgcactttaacaaggtatcttcgtctcgtctctttgagctgcaaagaaaactgcaagttatagagaagttagataaatcgatggatgattatcttaaggagattaaaagaatctgtgaacaacttactgctattggtagtcctgttagtgagaaaatgaagatttttgctgcattacatggtcttggcagagactatgagccaataaaaacttcaatcgaagggtctatggatcttgaacctcagcctacctttgaatctattatccctcggttaactggttttgcggataggcttgctagctacaacacatgcatggaagtttcaccacatatggccttttatgcaaactattcaggcaaaggaagaggaagcttcaatgggaaacctggtggtaatcaaggcaaaggagggcaatactcaaccaaaggcagaggctttccacagcaaatcacttcaggctcaagttctccgggttccaacaacacagaaaacagaatcatgtgtcaaatttgtggaaaaccaggtcatccagctttgaagtgttggcatcgttttaataacagctatcagtatgaggaactccctgctaccttgactgcaatgagaattactgatgtgactgaccacaatggaaatgaatgggtaggagacagcggtgcaacagctcacattacaagctctcatcaaaacctgcaacagtcacaaccatatggaggatcagatgcagtcatggtgggaaatggagattttctgcctatcactcacactggatcaactaccctaccaggaagctcaggtatattacctcttaaagatgttttggtttgtcctaacattggaaaatctctattgtctgtttcgaaacttacaagggattatccatgctccattaattttgactgtgattatgtctgtgtgactgataaggcaacaaagaggcttctggctcagggaaacaacagtaatggcttgtatgttctgaaggattcaccagttcatgccttttattcctctcgtcaacaaactatgtctgaagatatctggcatatgagactaggacatccaaatcaagaagtccttcagtatttgcacaagaacaaagctgttaatatcaacaaaagctccaaaggcatctgtgaagcatgtcagtttggtaaaagctcaaggttacctttctcaagctcttgttctactacttcaaggcctctcagaagatacactgtgatctatggagacctgcaccagtgaagtcagtacaaggcttcagtttttatgttatctttgtagacaactactctagattctgttggttttaccctctaaagaataaatcagattttctaccaatattccataagtttcaagctttagtagaaaatcagtttcacagcaaaattggaagttttcaatgtgatggaggtggagagttcactagcctcaactttgtgaatcatttgcatcaacatggaatccaacagttaatctcctgtccttatacaccacaacagaatggtttggcagaaagaaagcataggcaccttattgaattgggattggcaatgatgtgtcacagccgcatgccaatgagatactgggttgaaggattcttcacagcaaacttcctcattaatctcctgccttcttcagttctgtcagacaacaaaagtccctatgaggtattatttggtcagaaaccagattatacttctctcagagtctttggatgtagctgttatcctacattaagagattatgcaaagaacaaatttgatccaaggtctctgaagtgtgtgtttcttggatataatgaaaagtataagggatacagatgcttactgatttcaacaggtcgagtttacatcagtcgtcatgtgctattcgatgaggaggacttcccattccataaggtatcggcttccccacagttcatcactactccacttcgcatggcttggcaaaagagttttcaacctcagacatcagaaacaacagttagttcagaccagaatcagaaagtatatgctcagatcgacatagaagcttcagcaatacctattcctgctacttttccaactagtggtgatactgggagttctgggtgtacggcaggcattgatcctgttcctataggcaacagctctttagtatcatcacctagcttggcaaatgtagtgacatctgcaacaacagaaacagctacaacaagtcagtcatcagcaacaacaacagaaacaactacagaaaatagaggattatcagtacctactgtatcatctgttagacagtctcaaagacatcacatggttacaagatctcaggtgggaattagaaaactaaatcccaagtatgctcttcttacttcgagagtcaaatatcctgaaccaaaaacagtaacttctgccttaaaagatgaaggatggaataaagcgatgcatgaagagtatggaaactgtcaagaagcaggaacatggtctcttgtaccttattctccagatatgcacgtgttgggcagtaaatgggtcttcagaaccaagctcaatgcagatggatctctggataaattaaaggccaggttagttgctaaaggatttgatcaagaagaaggaattgattaccttgaaacttacagccctgtagtaagaactgctactgtaaggactattcttcatgtggcaacaatcatgggttgggaaatcaagcaaatggatgtgaaaaacgccttcctccatggtgatctcacagaaaccgtctatatgacacaacctgctgggtttattgatcctgcaaaaagagatcatgtctgtcacttatacaaatcactctatggattaaaacagtcaccaagagcatggtttgacaagttcagcacttatcttttggagtttggcttcatctgcagtatgtctgacccttctctcttcatctacataaaaggaaaagatataatcatgcttcttctttatgttgatgatatggcaatcacgggaaatagctcagataccttagctactctccttgtggaactcagtaaacgcttcagaatgaaagacatgggtcagctacactattttcttggtatacaggcgcaattccattcagggggactgtttctctcgcaacagaagtacgcagaggacctccttgctgtagctggtatgcttgactgtgctcccatgccaacacccctggctctacaattaaacaaggtatctcatcaagaccaacaatttgaaaacccaacatatttcagaagtttggcaggaaagcttcagtatcttaccttgactagacctgatatacaattcgctgtgaattatgtgtgccaaaagatgcacatgcctaccgttgcagacttcaatctcctgaaacgaatcatcgggtacataaaaggaactgtaaccatgggaatttcttttaacaaggagacagactgtaccttgagagcttatagcgacagtgactatggaggttgtgaaacaacaagcagatcgactggtgggttctgtaccttccttggaaacaacattatctcctggcagtcacagaaacaaccaactgttgctaaaagttctacagaagcagaatatagagctctatcagaagcagcttcggaaattacctggctatgcaagattctgaaagaactcggtattcctcttcatcaaacaccagaactatacggggataatctctcctctgtttacctcactgcgaatccgactttccacaagaagagtaagcactttgccaatcattaccactacgttcgggaacaggttgctctgggaactcttcgggtcactcacatctcgaaccagtttcagatcgcagacatcttcaccaaatctctgcctcacggtcctttctcttctcttcgattcaaacttggcgtagatgttccacccactccaaatttgagggggactatcaatggagacaagctagaagaaacaagaatgtttgggaaagagatcgagaagactgaaaaaggtgaagaagacaaaagacctaattcagcttcagacacaactcaatacggtgtcgttgagtcagctctaccaaatcagatgaccaagcccaataacatggtctggaggcccaaagcagaaaagcagcccatttagcccatccaagagcaacggtcacctgcaaaacaagaagacaaaattaaggaagcttcaaggaaattgctaaaagatgaaagcaattccagctgtccaagtcaagacctaatcttgactaataggtttgaatgtctagagagtgaggacctagcttaacctaatctagagactatattggagagtctaatgtaatcacaacattaagagagaaataagatggaaaatatttcagtctccttcacatactatctctaaagctgactactttcatgtagaagttgggcacatcgaatacatgggattcaatgtcctggctttatgggaaagaagaacgggaaacgaacaattctgcggagcaaattgtgaatgctaaattgttagatcgtgaggtaactgtcatttattttgtttggttttcactaatcgttgatcacatatttgattacgcgtttgagttagtgacagcacaatagaaaagaagccatacaagcaccacatcttttgccatgaatacacccatcaatccacatccatactatggtatgctacgatcaaatcttactcctaaactactagaatgtatgtagattcatgatcagctgtttctgttttgttttgtttttttttaaaacaggcccagcctcgattgattcagcactttctaaagatactttatcaggtaactctctcgctcaaggcatttattcaatttacaatgcttctccggtttcttttccttaaagctaaagaccagtacctgacattttcttggttcaagtaaagtttttttttgttcactttgaaatgtccagttctttctattttcttgcaaaatttgcagacgttacagtagctaattctgcagaatctttcttccgttccaactctaattgttgttaagtgggtgagttcatggagacttgcagcgtttgtaattgtttgtatccttatacatgtggtatgtatattaaccagtgacttgataataacttaaactatctacaaagtttatttatttctaagggtggaataagattatttgcatgatttaggtttgagaatcattatggaaaatggcaacgggttcactatgtgtcacaaaagcaatgcaacatgaactggatcagaattagtgtggtgagatgaaatttctcatagatacctgttatatttgattataaagtaaaaagtgatgtgattctgattctatgcaataatattctgagttggtgttttttgggcagcaacaaggtagataaaaagctcttggagaaagttataggtgaaaagagtatgcactttggctccatcgttaaggtttctcaaacatatttatcaggccatttaatccgtttataagggtgaaatctctagaccaaccaccatgtttcctatcacaaagacacaatcggcgatgataaactaacaattgaagagaagagataagactgagattgttttacatctgtatttattcttataccaattagttgtcgttttttttctttttcatttaaatgttcttcgaaaaattcagtagttaatataattttcaattagtaaaacaaagtaccacgtccgtgcttagcacgggcataatgctagtttaaatatatattcaaatatgtttaattaatattgtgttatttttttaaacttgagtgttgtttcattttgcaaactctaacaacaaactttggttaagattaaagtaaatgcatttgttacagtctttcataatttttcaactaaagtgattagtgatgctgttgtttcatttccaaactctaatcacctaagctatggtcaaagctttaaagtgagtgtatctgttacagtgtttggataaatttccaactatatggatattgttgattcacaacttacttttttgagggttattataaatttaggcatattttgggccaaaaattataaaaaatgcatatttcaattgggcttacaatcctaggcatttttggcctattaaaagtctttttgccctgaagttcactcttcatcgtttccttctcttcctcttcatcccttccttttcttcttcatatttccagaaaattttaattttgttcttgagaaaattcttttttgattacaaacactaaaccctaaggaatgatactaaaactcaaacaaaataattaaatgaaccgtttgagatataaaaaacggatgaaccaattacgaaataaaaatttgagatcttatcattgtcttcttcgagctcgtttatcatgatacgtgagtcatgaccatcacttctcaccgccgcccaacattgctgttgccgaagcttatatattgtcgtcgttccgttgttgtaagcggagatcttgtccgatgtcttccattacgttaaaaaattgaattaatcgattcaatcaaagaaacaatctcagattaataatttaaaaaaaaaaaaatcaaagaaacaatctcatcaattggaggaacctcaaaattgattgcggaaagaaattctagacccaaatttaatttttaattaatttgaaaagggcaaaatcgtcaataaaaggtaatagaagtacacattcgcgtaagacatgtgtaaaatgtttaatcatacaatacccttcattttattgtgctattttcataattgatcatacttttctgaccattttgtgtttgtgtgtcaactacactcttacttcattacttttttttttcttttttttttctttctattatctgccttgtattaaaattagatacccacaaatttgggattgggctttggtttacaatgaaaaacaaagataaaggcaaatcagaaaaaaattatcggaaaagaggatcttgccctggtgacactgtggcgcagagagtccgaccattggcaccggcggatgcaagaaccacagctttgcagcggatcgaagtatctagtaaacagagatgaagcatccgactcccgattctgttccttttcccttgatcaactgttcccaccacagatctcttggtatggtcaaccctccgacatcacgacacgccgttgtcagctcccgaacctagcaagtcgacaatctcaagcataacccctccttttcaatccggcgaatctttgatttacctaacaaaaaaccttcaattcggccaggaggaagcagatcacggtggtgttagaggttgatggctcaatcggaaacccaaacacattgaatccgctataggcaacaagatccaggaggatccatcattaaccatcatggcgattcggcaccacccaccttctccacatcgacttccgccgtagttgcagagaccgatacgacggctgaaccacgagaagaatccgttacaccagccgacgtccacaaccaaaagaaacagtaatgaatctctacttccaacatgttggatccgcaaacacatcgaaagggacaaaatcacaccactaccgacggagaagggatcttgttcacccctgaaatttcattgatgttacccattttgtatgtaacattgtttcttctttgatgttgacaactttatagttgtaaaatacaatagccactaacaatagccactaacaagtgtgaagatatatatcttaaacactaaactaccaaaagaaaattgtgaagatagatatttggacaattccactcacgattactattgcttttgatgtcgaacaaaaacgttacttgctggtttagaaaatataggatcaaaataatgcatctacatgactacatcaatggaaacgaaaccaaattgggccaagcccattaattaaaaaggagacacccaacattagatatctacttttgtccatcaaactttgttttatgatttttatcttgtggtatattattatacacttcggaatcggttgttccgttccttttcctggtatcaacttatgtgaacaatgagacattgagacgataaatcaactcatgatggcttcgaccaaaaaaacgcatttcggatttcaaaaggaatgttacaaatgtaacatcatcgctgatctatttacaacacaaagttttactttaaaatcgtcatggcatgatgatgttgtgatagagatgacgatgaagaagaatggaggaagaggcagacgactgacatatcatccatggagtatcctcgtctctttttcttccaagcccgaaccgcttgctctactaatcgcttagccgccttaggccgctcagccgttgaggagacaatctctatagcctcttggttagagatcacatcccatatcttttacattcaaaccaaagagaaataaaaagattaattactaaagatgccgataaataatttaattaagactgtacaaccaagataaaccaagtcgattcaaatcgaaccaaaatgtatacaaacaccaaaatttatatacatttgaactttaaaaatctatctacctaaacatcaaagccgaaccaaaaccactcaagtcgattcataatagatttatataccaatgagtaattttcattaaaccaaaaaactcaaaccaaggaaaacctaaattcggattaaaaattcctaaatcaaataaacaatattccaatttgcttttcttttggtattaccaagtctcttattcaaatgtggttatttcttttctttttcaaattgactttttataactttttgaacgttttaagagtgtggatgagtatattttgtttgtgtaaaggtttataagtatttaccccatcactggccaagattatgaagtggtctttagtagagatgtgtctttgagtgacttcagggactgagaccaatccatactctttaatacagtagtctccgaatgctcttgacattgcgagccccggtgtttctgcgtctggctgccacacacgatggactcccggctcatcatctagacagaaaacccgccctttgcagccaattatccgctccttctcctctgttttgtttttcaaagcaacccaaattcaagattaagagtcaagaattcactagaatatacatataagatttgtattttgtttgcttctttgatttctaagaggacggaagttaaaacttccgagatctagtaaggtaaaaatgcttatggaatttaagagggattaagaaaactaacgtggtagattcggtttgaaatcgagggtgagctgaaccgcaaccaagcttccctcatccgactccatggctagtaccgctcttgaatcgcctacatttgctacataaataacttcaccctacatacgccaataaaccattaatcagtgaacagaaaaattctcaaaaaacgtttactaacaataggaagaaactaatattcattttaagttttacctgtctcacaatggttagagctgttgtgccgctatagtaagaatcgatcttgcggtgatgttcaagctcttgatcaaccgttgcacacgtttttagataggattgcttccatatgtcgaatcttgagatttttttattagagccttcgaggtcgagctcgggttctagagtggcctgagcaagaatcttttgccagttgcaaagaagcgacaaaggcattgagtttcttacttgtttggctacatagtgaccccatggaccgtgtccatcgaatatcccgcagaagatcatgtcttcttggcacccaaatccctgtttaccaaagataaatgagactttttacaagcataagtactttttcataagagtcttgtgaaaatatttaatttaagacgcaacgagaagctataaacatactcataaagcggtaaataacataaaggactatataaatcaagatgatgttattgtacctcccaaacgagtgcacaatcctgattaacgcctttttcgccgcgtttggagaaaagagaggctaaattattagatccttgtacattaacataaccagaggatttcagaatcaattcttttttcttagcctcgcttgccatctcatcagcagcttcctttgcgtcgcagtttccattgttgttcttcactttctttatagaaaatgatcgagctaatccattgaacatcgatgagaaatgtcccatcttttaaataccccaaaagattaatatatcaagcaacaacgagaaactttctccttaagcttcagatgatccttaaaaaacaagaaaccaaaacttctttagaaactttgatagtgctacaaggagatcataaaacagaggttaaatcttaaaagtaagaagatgagtcatagtgttgagaatctagacactttgaaaaacaacaacaaaaattgaacttcaagtggaatattcataagtctgacatggaattccattgaaacaagcttctaagatttatctttgatgtacatgattttgacttgaagggaaagagagtttctgtttaaagaaaacacatctagagatatttcttaataaggaaatgtaaaacaagttgcaagattccaagattcttctcttttgctttttcagggaaaactaacaagaaacaaaaaaaatgagaactttctcagcatgttgttgcttaatactatatattaatatgaacacctaaaaggctaaaagaagcaaacactcttaatctccatagatttgcttcaaaaataagtttgataagataaaaatttctaaatttgagacaaaggagcaaaaatcttcatatcacccgaagtgaaaaagtgacgaccaattttacacaattttttttttactttttatatcaagaactaaaaaccttggtttacttggattcagaagtagaaaggaaaaaagacagaacccaagaaaggtttctcttcagctttcatttagatcttgtcacagaccaatcatattcttcttacatgtataaagagagagaaagatttagacctttgaaatggcacgtaaggataaacgctcgagaaaagctggctaaagtatccaccggagaagtagctaatggagcgacgagagaaaaatatcagaatccatttaatggaacaattaaggattggagttgaaactatttttaagaatagttaaacttttttttctggtacgttgtttgtctctgttcattttttatcttgtggcaggagaaaggacaaagaagtagcacgacatcgtctttgttgggtttggtcttttgtggttgatataaaatcattaaatttcaattattacatttctccacgatattttgttgattttatgtatgtttttaaaatgtaggttctttgaataaattattgaaaaataaaattgtttgatttagaacaatattgtttgggattatactaaagaacgacagctacatgatatatttgatataattagacaaatatatcttctcgattgaccataacaatttaaagaacttaaatagttttaaatgatgttaagatttgatcataaacgatagattattgtcagaaaaaaatatttaataaaattgggtacatgatgaaatgggttatgagatggctgactatgtcccaatcgttacatcaagggtcaaatgaaacagatccaaaacattcagtaaatattacaattcttcgagaatactaatcaaatttgtttaattcttcacttatatatttctgatattttttcgcaaatcagaagtcaaagttaactaatttcgcaaatcagaagacaaaattttcttgtggttaactattaacataaatcataataattggtacaaaattaggtaaccgagagttgttaaaagatattaaaattaggcaagcaagtaaagaaaatcatattccatagttggggaatccaatcatacatatatgatgttatcattgattatttatttaacattgttatgaaatatattaatacttttaaatggaattgcgtcatatgattatcgtgataactatattcccgcatgtcaacgaaaccaatttagagtaaaatattcaagtattgttatgaaagtgaatatttaaatacgtacgtgaacgtgaacatagttgatgtattacatacgtatatgattaaaatattatcaactatctttctaactgaacaaaaattaggtcaatatcaacactttaaaattaggtaaatttaaaatttataactttcactttatttatgcatatgtcagtttgagtaaagttaattttgtaagttaccatttgtttactattacttttagacttagagagctttctctcaccaattagagttcttggctttgtcttaaaaggtttgccattagtaggttatcaatcacaaaaataaaaacaaagtaatgaaactagttataatatattaatatcaccaagaaaatagcattacaaaaaatgtatgaaagtatcacaaagagtaacaagcgttatcgtttattgcttttgcttgactatatgttaaatgaagttttacataacagattttgtatcaagtatcggatacaatgaatttatattaggataaaaacatataagagattttaatcaaacagattattttggctacgcattttgtttaccgaccaaataagatgggtagaaaaagcatgaaatcgatagaaatgacttgacaataatgctctcttaacttttagtaaagtctagtagaaggcactgcactaattaataattttcaaaactcagacaataaagaaagaaaaattgctagaagttacaagcaaaggggtacctgtaaactacaaaagattgtttcattcaaaaaaaaaaaaactacaaaaacatgcttcgcttgttagcagcaataaattatatgctaatgtttacatttccctatgttataagaataaaacgaactagattttaatccgcggtataccgcgggacgatttattttttgaaagtaatatatattaaaatttgcaaattttatttttataaaatatttatattttacagtttataattgttattaagtaacgttataccacgaatccatgagacaattgttaaaaaactgaagttttaacccctgttaaaacagcatattaataatattttaaaattttataaatattgattcaaatacatccaccatataacccaattacaaaataaaacccgttctgtaatttctttacccgtcccgtgatttgttttttaatgtagtaattttttaaattaagaattattttttatatataaaagttttgcaaattgtatcattctctaatacatttatattttatagtttaattttatatacagtaacattatacataccacataacatttttggttttatataatcttttctaaattaggatgatttgatatgtttaatattaatggtcttaaaaataataaattaaagctttaacccgtattaaaacggtgaattaattatattttactttttttattaatgttgattcaaaaacccgtccctccaaatccgtcttgccaaaaagtcatttattttattaatattaattttgttaatgatatgactctgaattttaatctaaacattttagctaataacataagagtgcaccatatttatttaataggggaatgtaccatatgacccgaatgcacttttatacaaatccaccaaaaaagtcttgcaaaaatactatagagataagaaacgatagtcggttttgataggtataagattagcaaatatattagttagcttaaattagttaaagaatacaaattgaaaagctatattacactttattcgaatatagtattaaaacttatataacatagagatttgataaatttttaattgttgaatactttttttgtgctaatttttatgtgattaagatttaattgatttcgtatataaaatattaaattgacttatttgtttattatttggtaacagatagatatttgaatattcagtatattttgcttcagtttaggaaatctttgatgatccttctttagatccaataagccctataatctagatattaacctgcagtataccgcaggtaggcttatattttagttaaactaaatttttttattgtaaagatgatttaaaaatatatgatattatttgatttgattttaaatgtatagtaaattgtgagttgtatatgttttgttgatattatctatattgtttagtgtttaaaattatacacttgtagtttgattgttaatttaagagtttcacctgtagtataccatcttgtattaatatcgatctaaacccgtcaattctaggattttccagcttgtattaaaaattgaatcacatctaatatgttattaattattgtagtatataagattataaattttcaatataatatgtatgaaattgaatataaatatttcaaattatgacccgttacttagtagaaagttttcttaaatctatttttcacccgttataatattttttcatgtattgaacagtttatattcgtttttaaaaattcaaattatggcatatacgaaaaaactctaatttgttttttataatgatgatattatttttccgcaaaaatagatcatataaagatgagaagtgaactataataattaataaaaaattaatatgataatttagatatcaaatataatttgttgattttaataggttacttttttggaaattaataatgtatttcatttttctaattaaattaaattaattaaaatttagatatcaaatcttatatgttgattttgattggttattatttttggaaattaataatgtatttcgttttttaattaaatttaattaattaaattagtatttgactttttaatccttaaagagataaattaatttactctttaaatttttatttctaatggcatacctatgtaattacttacaaaaattaaggttacatttaaaatgtacttcccaaataatatagtaggataataacttaatatataagggatatgtctttgatattgtagaatttcatatgcgtagaacattcgaaaaaatcatctttagaaaaccagaaggtgtaggatgatccaattaatataaatttatatttctctaagttaatatcatgttgtttagggctgtttactataaaaacattgttcttgcatgatcaaacgagttatgctgaattagatatgcttataacccttgccaaacaaaataattatattgattgatctatatatgtgataaatattaaaagaaaaacatttatttcaaataagataatagtaatacatacaagcaagtaagaaattaaaatcccttaattaagaatatataaaacttaacttattagaggatgagcaattcgaaaatagaattaaaataagtgatcatctttgacatgttcaaacaaataccaaaacgtgtctttttcacaaaattatattagttctttttcaatatgagtatttataaaggttcgaaaatcattgaaggagataattcaacaagacgagtcgttccacctaaatatgaaattaatatatataagaaactgtataaagtattagaaaaagctaaatagatatataacttatttgtgtataagaaatgtatcaaataatatacaaaataaataaacattaatcctgaaaaagaaaatatttactttaacccttttcagcttattgtactggtaaagatggaaaatatatgcataaatgataaatgttgtatgcttggatcactattgaaggcttttgctgatctttcgacctttggtattttgttcttttggtttggttcttcacgaggtttggttcttttggtgcagttaaggttcgtgggggttctcttgtttggtttagtttactttatacgaactttattcttcctttgcaatagccaatatgaataaaaaaaatgataaaaatccaatggtgagcatgcaaaattcgtataatacacgtaggtcgtatttatacacgtttaacataaagggttgtaaagtatagataaacagtttgatatatattgtatacaaaaaacaagcatatactattgtacatgtgaaatgggccatgttatgtacctatcattgaaactataaaggtacatactgacatacataatccaataaagattaaacatcgattgagtgtactatttcaaaaaagtgaattaaataatcatcaatcacacacaaatatctcaaagagtattggttgttcgaatgttattgtaaacgagttattttatgcaatagacagctcataaaaaaagggttgattggtctagtttgacttcgttattacaccatgattatggctttgaatagtgatccaaccgcacattatggtatattttaaataataacaaaaattttctatatatatatttagagaattttgttattatttaaactgcaccgcactttattcgcaattgaatcgtaaatctatattccggtttgatcaaaagatattttttttgaaaccgatcgattggcaattatctagacactgaggcgatgaagcttcggctttcacattactcgaggagggactagtcagtgagacagttatggggactgtgtatgaccgcttgtgacggtagtcttagagtgggaccaaaaagacacgcataagaaaacaacaaacactgaatttttgtattcgttggatgaataaatccccaatatgtcggcaacaatcatgcaacaccaaatctttttctctgttttcaattattttcttgacgtgatataaaaacaaagtattgatagtagtaaataaagaaatggtttttgacaggttggatatttgaattttcaaaaccatttttctgatttttttcataaaacaaatcgtctagtgtgtataagaaaacagtaacatactaaaaatagactaaaagatctccgtatctttctttctaatcatgtggaactaaaaaatacgtgttccaggccattagatctgaacctacgtggtaatgagtcatatggacctatgcatgaaaacgtgacgaaggaaacaattaaacaaaggatcactactagaccacaaccaagagactcgatgatcacttcccaattttataggggaagttccaattcggcgaccgaacctaaggtcgaagaaccacatgatgagttcggttctcgcggggcccataagtgagcccaaccataagaacttttggataaaaaagttccattctgtggtcgacacgtagctagtgagtagtgaccaacaatcacatgtgtgacggtgcagcaccggataagtcattcctttccataacctttttattttcaaacggaacatcatcacgtttaagttttcctaatccttttctgataagagaatgaaacgtatttactctaatttagtaagaaaatattactaattataatcaacgttacaaattaaaagtaggtataaagtagcgtggcagtattttctatgaatatacttctttatcattaaaaaaaatatatatggatatacttttgtgtattggttcacggaaaatcaactgttgtctgagtatttatgttattttaacaactgctgattgattttacttttgaaaaaaaaaaaatagaactattgagtaaattttcattggctgatttctagagtttaaaaaaaaaacagtggaaaaaagtaaaactccaatgttgtatgatattggtgtgaaaaaacccataaaattagcataaaggcccataattattcatgaaattgttcagaaccggtagatttccttaggttaaagtttactccatacacagaccaaaacatcaaaacaaactttgcagatagattaaaaaacaaacttcaaggaaagatgaagaagcaaaagatcttctgaattaggtaaaaagagcaaatacaattagagaaaaaaaaatgaaaatgaaacatgccacctgattgttgttggagccgataaataaaaatttggtaaattaccttggtcaaggggcaagaacaacaatgagtcaaaatttggtcggtttgttttaagcgtgttcattgttcaggcttaaaattcaacacacaaagacatcatcatagaaattatacaaaatcaaaatccaaattcaacaataaatagatccatgaagatacccttagtgtcaatctggtcatagaactatacctaaattattagtatttcttttaacggtaaaacaaactatgtatcggcaagtgcttgatcctctaggcaatacaagaagatccatgaagatacacttgtgacttgtcacttccattttagcttgaactccactgattttgctttttatctctacaaactcgagtgatgagaccaatcaccgagggccttagatgaagaaaataagcaccaacttccatttcatacaacttgactcaaaatcacacaacaaaagctgatggagtcttaagtacgcaaatgtctaacatatataaagacttaggggaatcacctttaaaacacctacgcttaatttacatgacatttagcaacaagatgcttaagtttacgcttaaccatatatatcaggcaaccgaaatcaaatttaagactcacacaaaaatagaagaagccaagactgtttttagaaacttgagaaattactagcattcatacttagggaaaatatacaattcaaataatttcttaccgtcaatctttccaaacccttcacgatctcatcttactgtatccaaatctttatcatcatgtaaacaaactcaaagttgcaggcttttatacgttttttcttccgttgatatagaaaaatcaaagcgttatggatattttactgttaaagtattactagagaagagaaaaaggttttctcctttaagaattacaagtctctttatactgctcgattttaatttagtgataaattcattagtagactgatgatggtaaatcctctcacacacttgacagagaggtaaacaatttcaactctcacgtacggacgcatcactaacatcattacttcaacaaataaataaaggagcatgcaagaattacaataaagccatatgagttggctcctattccacctacacaaccatacacgagccctaataccatggtgtccaaatgttttggtgagaaatcttctaacggacaagaaagttacatgaacaaaagtaccgatagtatataaacatccaaccaattgtcaccatcattgctatgtccagttgtccacgccttcgaaagtatatgaaatgcaaaaaatacatatcatcatgaccaaggaagatgcgaagccgcgccccctctggtcctaatcgacatgtttggactggaaggactttgtacatgcatcttctacaccaaggacacaatacaacaagcacaccatatggtttaactaaccctgatgaacatattacaatcattaattatctaatattatatatgtattgtaaataacaacgattttcttacaatgttccatatccacgtacatatacatgactgcataaattgaaggcactgagtgacaattgtaaggccgcccaataacatctttcacgataggaatgactagtcgctccttggttgctatattctcatcaccactaattctgttatgaacttgattcgatgaatgcacataagagtaccgactatacataaaaggtgacaaaatctgtcatatccaatcaaaattttgaattttcttaagcaatttgacatatcttatttaatttctaatttaaactataattcataaaaatttagctagtaatttaaatcaatactagattgatatcccgcgctgtcgcccgaaggcaaaatttatcatttgagcttctcttgtaagtatttgtattgggttgtattgttatgcttttgtatctgtgtttcatcatgggttggaaactgttatcaataagatgacaacaaaaaaaaaaaacaatatatacatgtagtcattctaacgacttgtttgcaatttgtgttttaatagtcttaaggttgcaaattttctaattccatgcagaatattcatgattcttttttttttttaatatcaatttgagaatccatatctccaagactatgaagaatgttagaatgatattacactataaggatgtagtactattatggacggtaaagatgagtcacactgaaaatgaaagaagtgggactgagaaagaaaccaggctgcatgcagttggatcgagatgaatgaaaaagtgtatcatttctttgctgaagacagatctcatccatgagctgagaaagtttatcagtgccttgctcttttgagtggtcacatggacgctggtcaatgattcttatgttgttgcatctgtcccaattagaagacaacatatcaggctaatgtccaattaacacatggtggatgctttcacagccgtttcatgcttttacaaaaaaaattggtggttctaatgcaacactggatcaaaagaactatcaagaaagcatgttccacatttaagggtttgaatggtgatggtagtcgggatggacaaatccgtcagcggtttagtccgttctatttttaggatagacaacaaaccgctgcagaccaactctatttctatgtaaaagagcggtcggtaattagtctccatcagttttttttttgaatccgcactactacagacacaatttatgattggtaaataaaaagcggtctaatccgaaaacggatttgtccgccttaaccgctgcaaccattcaaactctaagccttttaaagctcaacctaaactcaaaggctaataggctatcaacattcgtgctgcttctcgcggttaaggactccaagaacatgactatctccaatgttaaaatctgactaaagaaagagttagttacatgccaagatcaatggaacgagcaatgacgttttggccttcccttccatgtaaactatgcatcgaagatcccaccataacacttgttcgggaatactctataagcatagaggacagagagccacttaattaacatcactacaaaaaaaaaaaaaaagactcatttgcattacataatttgtgtcaaaaaactaaatgatactaatttgaatcacttatttacaatcgatacaaaaatattatttaacatcagttacaataattgatgctattattgatatatatgacattatttcattaaaactgatacaaatctagaacgtttgcatcactataacaaaaattgatacaactctaagaatatacattatttataaaataatacaaaatttgcatcaataacaaatgatgttaattaaaaattaagcatcagttgtaaaaaacgatttaattaattacttaatttgtcaaagtcccacatcgctcccatgaaaaagagacttcatagttttcttatatatagtgactctaagaatttacatcatttataaaatgatacaaaatttgcatcaataaaaaatgatgttaattaaaaagtaagcatcaattgtaaaaaaacgatttaattgattacttaatttgtcaaaatcccacatcgctcccatggaaaaggaggcttcatagttttcttatataaagcgatcttggtttttatattgtcaacaaagtgttaagcttaataagcaactatttatactaaacatatataatcgtttgcttctatattaattaataaaattaaataaatttgattactaaaattgatatttaatataattttaaattttttaacattagttatttataattgatataaacacctaacatcacttcttattatcgtaacaattattaacgtcattttgataaattgatgcaaagactaatatcatttatagtaattgaagtaaaattaacatcattttttgcaactgatgaatactaacatcgatcattataatcgatgcaaataattatttggaacgatgcacataatttgcatcaccaattccagagtcacttatagaagtgatgtaaaactcatttgcatcaattataactgatgtaaatatacaaaataagtgattcaaaacaccactttttattgtagtgcactttagactatgtatgtacaaaaaattagtttagtatatagaggataatccaaacaaaactaattttgaaccaatataaaatgaacttgtagataatacaaaatcctagataaaagaccattttaaatcccacaagagacctacatataattcgtcaccaacgctataatataggaaacacacaaggataaaagaaagaaagattataaaaatggcctctctaaacatattgcgacttgttcattgggatcaagtaaaaaggaatttggaaattgacatacaacattccatcattaatattgcacttcttgtgcatacgaagaatggatcaaatcctcccgcagacatcgtaagaaaatggtcgaagcttatgagagtctttacgttttgaaagcgcggcggaatttttatctcaattgaatttatgaagcatatttctgttttttttctccctaaaaaggtggtgaataataatatttagagatattatatgaaatgtttaaaaaaaagaaacgaaacaaaaagagatattagatggaataatagagcgagattattagatagcaattaaacaaataccacattgtatgtttagtttctcaatataactaccgaatctaacattagaaaaagtattatgatattacgtttagaaaggattactcattctaagaatcaaattttggaactcaccagaaaaaaaaatcaaattttggtcctaccaagctataaaaaatttgattgttattttcaaagtggtattccttattaaattgaaatttatttatgataaacgagcatattgtttctgatatcaaactggtgaagggatttagcataactctatgcatattgtttccgaaatgataaacgagcatattttttcatccaccgtaccagtaactctatgcagcttaccactatattatgtagcgttttgaaattgagtttgtaaattatgttgattttcaatgcttgtggtgagtttggtttatgcagcttactttggcttataggattacaagttaccagtataactaggctgcaattttgttgattttccagtggtgacatgatcttattggattataatcacgcatcaaatcctgatggagtcttaagtacactagtgtctaacatatataaagacttagtggaatcacctttaaacactaacgcttcacatgatacttagcatcaagatgcttaagttaacgctttaccacaaaatctagggtaaaataatcttaacaatacacaaatgtggtagaaaaacataaagagaaagtggtataaactaaaagaatataaggaattgtggtacaaattttaattttttcaatggaaaaaaatctcaaacaaaatcttaactatttaaaatttaccagaaaaacccaaattaatttattggtacaaattaaacccaaactagaaaatattggcagattcataacacgatttcaaaaacaaaatccaattttactctaagaaaaaacttaattctatttgtttgaaactagttgtcgattttttttgtttaaaagtacatatttataatataaaagtagttatataaaataaaatttcatttgtattcatgaaataaatagataatcatcttatatatttaactgcttatctaacatcgacctattttcatttgttcttgaaatatagacagttttgctcgatctagaaaacttaacactctttatgcatcatttttggtacatgcataccgccattattgtagtgctaaaataaattggataagagatgttaacacaaaactaactatataattatgatgaaaaaactaaaatatgaaaataactcgaataacattcaatcatctcgatattgagaaaacaaaaattagagagaaataagcaacgaaaataataatagagaagcgatttggtttttaaaatttgaaaagctaaaagtaaaaatatatgaatagatgattaaaagcgaaacgtcatatcatttttccgtgataatatctaaaaagttaatgagaatatatcaagtaaaaatatataaagtaaatgagaatttttttaagtttcaaacaaatagaattaagttttgtctttaaaagtaaaactggaattatttgtttgtttgagattgtgtgtatgaatctatcaatattttataattcaagttttattttgtcactaataaattagtttagttttttgaaggcgaattttaaattagtttgggaattttccagatttatattttcacaatataattaaattatattgatggattgttttatatatataactatagcactaaacaactttcaataattcttccgacgcaaaagactctcttgagaaaccctaatttcaactgaaaaaatggcagaaaccgccgatacaatcaacaccaccgtctcaacgccgcagccacaattagaaagcagatcagacgagacaagttgcctccaaaaacacagatctgacgcaacatcagaggtgacgaaagaagagaaatctggaggaatcttgttcagcgtttggccaccgtgtcagaaaagtcgcgactacgtggtgaatagtatgatcaagaccttatccacagactcgatcctctcctacaaatacggaacgattaaacctgaggaagcctccgccgtcgcgaaatctatagaggaaaaggcttacgacatcgcatcaaggttcgtgtcgagtgatgggattaagaatcttgaggtctatggcatagagactagcgagcgtatgattgaatctgcggaggttcgattcaaagccaatggaagtatggaactactactaaatcaaacaataaagatgatgcagttgctgatttagaggagaagcttgagcgttaagtttccttatctcttttatgatctatctctagggtttgcttttgctagatttgagattctcaaaccagatttgtttccttcttcttaatatgagtcgttgattgcttttgcattatgtggtttagtatcacacttattattcctatataatgttcaatttctttcgtccaccaccagtaactctatgcaacttccctcattaggttatgaataatccttgtaaacttaaaattatgattaaggctaggaggcacgttgatagctcaaacggattcgttgaggctcgtgaataagcaaagagaagcagagaaacagagtgaaaacagagcaaggagaaacagattgtttaaccactagcttgagagtctagtgagttgtatataaatagatagaagagtattgcacaagttatgtattgatgtgtgtgtaacaaacgtatggtttgttagaggagagttaggagatctcttgaacaaatcttcattgttagggcttggaagaattttaatctgaaactcacaaggcattgtaatctggaaattcaccattggcatctaaatccaacagagccagagtgtttccacctattggacacagcactacttttaacaacatcttttgacggaagctgccactagagcatctgacacataaaactgtgtcctcttgtcttgcactacaggttttgagttaatcgcttctctttcaaaacaactttgctccactgaattccattcacagaattgaaccgaaaactacagtttttgagttcatcgcatcgatcgattactcaattagttgcttatttgcgtcaattatggacatctaacattcagcgtttattgtatactgtattaaagctcttaatatagactcagacaaaaatagaattgagaattgcattcataatacttaggaaaaccataccaatcagacaattaaaactcataatctaaactagaaacagatcgagtcagggacttgatagaagcttccgttgtcatggttataaagaaagacagaatatttgctctgatgttgactcaatgatgaagtcgatagctcttgctctgtgtttgacacaccattctccaatggttctgtccattgttgattatggtgattctcaggagaagacaatagattcgttgtggaagaaaccgcacggctctgacctaacttggtctggtttttctcgggttggagtaacagaagcttattttgcagtacccgtagaccactttctaacgaatcctccatctctaagactttctcagacaatttattgtcgtcgaggatcttcttacgtagaaacagagaaaggtttgtccttttcttgcatcgctctctctcgtgtaatctgctaaacctctcagccatgtctcgaacttttgattgatcttccggccatgtcttgatgagttctccgtcacgaccataaagtatgacacagacttcgatgtcgcagagagtcgaaagctccaaggctttcttaaacatggtctgttctctcatagacaaattcgtggtcttttttgcagtggaagaagaagacagagacgatttcttgaagcaagtttggtttctcacagacaatttggttttcttcttcgtcgacattgaagaatacattgtgatgttttgtttacacacagaacaaaaagacgcttttatttgttatcaaagaagagaaaataaactctgatcgagagaattgggatacctaagtgaacagttgggagacactgtttacttgtgggatgcgtctagttgttatacatctaagcttgtgaccattgatgatgagaatggacctgtcacaagtattaactggacgcaagatggtcttgatctggcagttggtcttgacaacagtgaagtccaggtttgggattgtgtttccaatcgtcatgtgagaacattgagaggtggtcacgagtcaagagtaggatcattggcatggaacaatcacattctaacaactggaggaatggatggaaagatcgtcaacaatgatgtgaggatcagatcatccattattggaacttacgtgggtcacactgaagaggtttgtggtcttaagtggtcagaatctggaaaaaaactagcaagtggtggtaacgacaatgtagtacacatatgggatcgttctctcgcttcctcaaacccaactaggcaatggctgcataggtttgaggaacatactgctgcagtgagagctcttgcgtggtgccctttccaagcaagtttgcttgcaactggtggtggtgttggagatgggaagattaacttctggaatacacacactggggcttgcttgaattcagtagaaactggctctcaagtatgttcattgttatggagcaaaagtgaaagagagttgcttagcgcacatgggtttacgcagaaccagcttacactttggaagtacccatctatggtgaaaatggctgaactcaatggtcatacatcaagagttctttttatggcacagagtccggatggttgtaccgtggcttcagcagcaggtgacgagactctcaggctttggaatgtttttggagaaccacctaagaccaccaagaaagctgcttcaaaaaaatatacggagccatttgctcatgtgaatcatattaggtgaatctactgtgaagactaacaaggagaaaaccattgataggtaaataatgtatagagaagcaatgtattcatcttttttcctgattcattattcatgaattttatatagttaatacaaaaccaattatatatgtaaactgttgagtcaaacacaactaatatagtatatatatttctttatgagatttttatgtaaaactctgtgatgttgatgcttattgaagcttaatttgttgttgaaagaacaactctttccgattcaaagattgaattttccccatcaaaggctctgttttggatttcattgcagaaccaaagtccttttttttaacacatacgtgttaaggtttaggatctcttaacctcactttacaatctcagaacgataaaacagagattaacattgatctctcttcaagcacatcgcttggctcaagcacatcgctcgactatcacattcaacataaagcataaaccagaaatgagtgagtaatgactaatttatactcgattcccttcaatagcaaagcctctgtttccacccaagtctttctcttcttctttgcctttgtccatgtcatcattcaagtcaacattcttcttctgacgtggcatcatccttacatggatcgtatcaatacgcttgaggttgtgtgttggtggtgtttctggatttgtgtgttgctttttatggtaggtcttggaataaagacacttgctttttgttcagttcgagttttgcgttttctagaatccaaaacaatattagttcatagcttgatgaaataatctaggctccatttgtcatctctcttataattggcaaaccaatgatttatgaaaccgcaaagtcgggttatctagaatcggtttccataagctatgtttaatattctggttttgttgaataaaaccggttatgacaaaaccggtgaagcaactaagagcacgtacatagagtatcattagtaaatttttaatattaattagattataacccgcggtacaccgtagagacaattaatttttttaaattagtatatataaaagtctgcaaattatatttatctataaaaataaatattttttatagtttacaattgttattaagtaacatcttttcaaactcgttccgtcaaacccgtcccgttaaaaaaatccacggtacaccgctaatttaaataaatattttacaggattgcaattatattttagtttgtcaaacaaatttttgttttaaatagttgtcgaaatctagttcaaatattggagaaataagatttaatgaactgataagaaatgtatttaggtgagttttgctcattttaagggattgcaattgtattttggtttgtcaaatattttttgttttaaatagtttccaaaatctagttcaaattttggagaaatctgcgtgatatatgggattgaaatatgtttggaatattttttgtttgttaatcaattcattgccaaaagaaaaccaataattaaaagcagtgacagccattgtaaataagttccaactccaagatttatttcacaaaatggctgcaaaaatgtatatgtagattttaatgtttatttattgtttaaaattttgtatgatacttatatggtttttggtgatattgttaccagtataataaaaaatctcaaacaataaatagacattaaaattaatactaaaaaattgttaataatactcattgaatatcaactatgtgcatgctctaagaccatgtttatatgaacaacacagctcaaaacgacagatctttgagaagattgacaatccatgtgatttctgaaactgtttctgacatggctctatattctacttcagtggaactcttggctactgtaggttgttttcttgatgaccaagagatgaggttgttgcctagaaaagtgcagaaacctccagtggatctccttgtagagtgacaaccagcatgatcgctatcactgtaagccctcaatttacaatctgtatccttgttgaaggagattcccattgtagtggtacccttgacatatctcaggatccgtttgagcaagtgaaaatctgataaagtaggagcatgcatcttctgacaaacatagttaacagagaattgaatatctcgtcttgtgagtgtcagatactataatctccctgccaagctacaaaaataagttggattttcgaagagctcagattgatgaggagcattatctagctgaattggtagtggtgtagctactggtgagcagtctttcatggctgtaatgattagtagatcttaagcatacttttgttgggatagaaagagacctttttgatgaaattgagcctgaattcccaaaaaatagtttagtttgcctagatctttcatcttaaactgcttgttgagttcattgaggagattggatagtagttttgagctgttcctagtgatcaccatatcatcgacgtagagtagaagcatgatgacatctgatttctttacgcagacaaaaagtgagggatctgagaaactgcacataaaaccaaaagagattaagaagttactgaatttatcaaaccaagctcgtggagactgttttaatccgtagagagacttgtgtagcagacacacatgatttggtaaggccttgttgataaaatcagctggttgtttcatatacacagtttcagtaagatctccatgaagaaaggcgttctttacatccatttgcttcagttcccaattcatgatggttgcaaggtgcaggactgctctaacggtagctgatctaaccacagggctgtaagtctcaaggtaatcaattccctcttcttggttgaagccctgagctactagtcttgacttatacttgtctagagatccatctgctaggagtttgattctgaaaacccacttggaacctagaacgttcatgtgtgtttaaaaggtactatagaccaagtatttgtttcagaacaattttccatttcttcaaccgttgcagcagtccacttttcatcttttaaagcttcagtgactgtttttggtgttggatgagaaattttatgtgtaagcagtgcataccttttatttggtttgctaatgcctgtctttgatcttgtaaccataggatgagttgactctgtagttttgatgacgtctgatgttgattgctcttggtcagaagatgacgaagcaacgctgttgcctataggatcaagatctaagcttgtcgtacactcaggacgttgctcatcacttctagacaatcgctgttgaggaagaatcatttggagaggtgtaacacttattggatcaacaaccataagctgcaaattttcagtagtcttcccttgtacatttgaatcaataggatgacttactggtattaattatggctgttgttgattttctgttgttgcaggtgcttaactgaactaatcatcagcttctggaggtaaaaaggtagagagtccttttaaccaagctgcaaacaaaggagttgaagatgcattctgttgatctgtgtaagtgtctgcaaacggaaagaactcttctgcaaacaagacatgccgacttatataaactcggcctgttggtggatagaagcagcgataccctttgtatttttcattatacatgagaaaaatgtattttagagatcgtggatcaaactttgtgcgagcataatctctgagagttgggaagcaagcacatccaaagattcttagagcagaatagtttggagttttaccgaagagagcttcatgaggactgacattagttgcaagagctgttgttggtaagagattgcagagaaaatttgctgtgaagaaagcttcaacccaaaaattttgtggagttttgctttgaaacattagagtaagccccatttatgttagctatctatgtttcctttctgccataccattttgtagaggtgtgtgaggacatgatatgaaatgttgtatccctgaatcttgtaaatgcttgagaaatctttgactaatgaattcttctcctccatcactctgaaaagttccaatttttgtttgcaaaaggttttcaacaagattctgaaacttgatgaatattgagcaaaaatctgatttcctctttaatggatagaaccaacagaatcttgatagattatcgatgaagattacatagtactgaaaaccttgaacagaagaaacaggagctggaccccaaagatcacagtgaactctctctaggggtcttgaagcattaaagccaactgaccattattggtgatgtgagctgttgctgcagagtcaggaacccaagcaccatcatcagtaaaatcagtaatgtgcaaagcagagaacgtagcagcagcagcttcagaatgctgatagctttcatcgaagcgataccaacattgaagagcaggatgtcctcttttgccacagatctgacaagttggtctttcactaggagaggaagactgagaacctgaagagggaaactgttgctgaaaacctcgacctctggttgagtagtttctgcgtcctcttccttttgatcctttgcctcgaccttgattgttgaatgtaccaaaagcaagatgcggagaaacgtccgttgtgttgtagctttgcatcctatcatcaaagcctttgagacgatgcatgatttcagcgtaggttgggccaggaaaggtatctaaggtattctcaagcgaagtgatgagaggttcatattcacgggttaaaccatgaaccattgcaaaaattttcatcttctctgtaacaagactcccaactgaagcaagctggtcacaaatagtcttgagacaacgcaaatattcatccatggtttttccttcttttgacaaaccatggagacggcgctgaagctcaaagacacgagatgcagagattcgattgaaatgaccaacaagatttagccatacctcttgagatgttttagatccaacaaccacactgagaatgtcttcagaaagcgaacccagaagccacgccttgacaacttgatctgaacggtgccaagcttcgtagtctggatttgcaactgtatttgtgtgaccttcaatgtgaggaaccggaatggtgcttgctagaacagagatgctaccggtgacaaaaccaaaaagaccttgaccagagagaaacgattcaaactgtgatttccacagtaagtagttgcgatctataagagttacagtaacgcaatttgagatgtttagtggaggacatgagtaaacttccatggatttgtccatggctatgataccatgaagatatgaagcttagatggaaaaatctttcttttgattttatttcattcagcctattttgtgattacaacgatacattggttttatagtttctatttcttaacctaatgtatccttgatttgcttagctgtctattgataatcacgtggcatagctatcatcacacaatctgagagcgtcgtaacggttccttgtcgtcacttccgtatctgatgatacagattgctctgctgatcttctgtatttgtcgcttgttgcaggtagccgttgtatggagatgagctttggtgaagaccgaatcgcattgggcttctgtatcttttggcccatttgcaaagatctatcgttttgagctgtgattttatttgagtatcataaacccaaaaatcatacaagtataatacaaaatctccaacaataaacaagtttgaatattaatttttaatattcgggatccgtttatttttgggaacaaattcaatttcctatttcaccaaccagattgaattcaccaccaaaagagatcgacgtgtgcccgacatcagactttgcaaggcacataccaccaagatctcatctttaacggtgtccaatctgctcctcctcattcatctccgccgtcgacactttgaatcccatgtatcatcattcccgtaagtaaacttccgtccataaatttacgacggtggaaccgagatgaatatggtggggagacggtgatggagattagatggagatgagatggagatagtgaaggaaatggtgatggagaaaacattcacggcggcagaaaaaatatgttatgaaaccctaatagttaagtcccaaacaaactcaaattccatcattttgtcgtagtgggctaatattggactattgggcttaacattgataatgtgtatttgattaagcccaggatacaaatataatttaagcccataatacaaatatgtagacatattgaacggatgcggatattcggctctgatttttttcataatccggatccgtatccggatccgccggattcgtaaatgctttatccgtatccggatccgtcgcacccggttattcggttttccggatcagatcacggatccggatttgaatacccgcggataacggattttagtcccaggcctaatatacatgctctaatgaagaaaaataaaaggaacaaactttttctatgcctttgaatggacctaccatgaacctgattctctcttcaatcatttttttttctttcttttagattgtttttgatcctgaaatgctcaaaaagtcgtcgtactaatccactatcgtgttggaagatgaaacagagtgaaagagacagaagaaacaagaaccatttgtgaaatcaagaaccatcattattccatcaccagacacagaattgttcaatcatttgacaaaaaccttctaatccatacccttttgtcaaaatcaacacttgggttttcaatagtttatagctttaaacccataagaacgaatctggttctgtttctctggttaatgattgagattcttcaaagttttgattttttttgtagattgcttcatcttcaattttcacttttcatttgtattaaacattttcttgttccgaggggttttcttgtttctgacaaataaaaaaaaactttccttttctctctctgttttgaatttacattaatcaattatctgtctcctgaggttttatgacaactcaagttgtcttcttgttcaaagttctgcaataaattataataattgataagtttagagttctttttcctttgttcctaactaccattctttacattggatacgttgagtttgttgtctttgtctccattccactcccacttccacttttttttttgtcagatattggatctcgttcaggtcaaatgttgatttcagctgaaaaaggagagatcttgatccctcaatctccacttagctctgaatctgttgttcctttggtctatactgatgtcaatgttgttcctgaacatgaaagtaatcagcttgagaagtcaatatcaaaccttgaaggtatctctttattttgcttcttctcagttatttgatcaataggttttaaaaaatgaatttttgggttggtattgttacagaagaagtttttgaattgaagttgaagcttaagtctttggatgaaaagagaaagcaagttctgaataagattatagacactaaaggtttgttatcacttatcacattttgaaacttcttttgtgggtttagttttgattgtgttaagattaaggatttggcttaaattgcaggaagtatacgtgtgttttgtagagttagaccatttctattaacggaaaggagaccgattagggaacctgtttcgtttggaccagataatgttgttataagatctgctggaagtagtaaagaatttgagtttgataaagtttttcatcaatcagcaactcaaggttagtctactgttaggctttagtgatatcacttcttttggtttcttagctttctgtttccttccagttgtgagtaaatgaggccttcttctcctggttgaaaaaaaaaactctgtagaagaagttttcggagaagtgaaaccgattcttagatctgctcttgatggtcacaatgtatgtgtcttggcgtatggtcaaacgggaactggcaagacttttaccatggttagtccttcttgatattcagagagttggtattgtttctaagataaggaagagttttactttatgccttgtttaggatggcacaagtgagcaaccaggtcttgctcctagagctattaaagagcttttcaatgaagcttcaatggaccaaacacattccgtgacatttaggatgagtatgttggaaatctacatgggtaacttgaaagatttgttgtctgcaagacagtctttgaagtcatatgaagcctcagctaaatggttagtaaccaaagttttatctctaaaagaattaaaaaatttctaagtactgccttaactttactgcagtaaccttaatattcaagtagactcaaagggttcggttgaaattgagggtttgactgaagtggaagtaatggattttacaaaggctagatggtggtataacaaagggagacgagtgagatcaacttcttggacaaatgtaaacgaaacttcgagcagatctcattggtaagttcttgatggttccaactgttcatttgttatttctcagtttggtagttagccttattcaattagtttatctctagtttaacaaggatcacgatctttcgtcgtggagatgcggtggggtcaaaaactgaagttagcaagctttggatgatagatcttggaggaagtgagaggctcttgaaaacaggagctatagggcaaactatggatgaaggtagagccataaacctctcactttccgctcttggagacgtgattgcagcgttaaggagaaagaagggacatgtgccttacaggcaagatctcagctttttaattccttttcacacacatatgccattgaagcagcagagacatctatctggcagaaatgaaatagatcttgctttggtcatactactgagttagctttttcttttttgttgcttgcagaaacagcaagctaactcaaattcttaaagattctctaggtaaaggcatatggttgcttagaatattatcttaaaagtcttttgagattaccaacataagttatctaagtttgattgttttcatgagtttaatggatttgtgatttaactttatttaggtactagatcaaaagttctgatgcttgtgcacataagtccacgtgatgaagatgttggtgaaacaatctgctctctcagctttactaaacgtgcgagagctgtagagtctaacagaggattaacagcagtaagcacttgtactgcagtatttgcaattatatattcatttcactgattacttaatgttacatcatcattgtttaggaactacaaaagctaagagaaaagaaaatatcggaacttgaagaggaaatggaagaaactcaagaaggttgcaagaagatcaaagcgcggttacaggaagtagagtgtctggttaatgaacacaagaaactcttttggatcaccaatgataagtatctagaagacattgaaaagaaagctatttcgcctttagatcatctgaaagacaccgatgcaactccaatatcatctgataaactagtcaaaataaggaagagttctggttttgtcccacgtttcatgacttcaactgttgctagtcgccaaaggcaaacaatgtcagagaaggaaatcaatgcaaaggctcagagcatacgatcagtggctaaaaatcttactcagttctccacttctcagtcgcttagtctctctgactcacgaagcaaagctctcctaagaagatcatacacaaaaccgcttcaagctgcagctaacagtggaacaccaccagaaacgcctaaaagacatatcaaagataattctttacagagaaagaatatgaatgatacttcttcaccaaggagcaagatggttacttcatcggatccaaatgtgagagctaaactgtgtcaccacaaacgaagaatgtcaagcttgacatgatctaacagttatctttcttttccatctgttgtgaaagtgctgagttgtttttagacttgtggtttgagcctgagtaggatgaggcggtgtcctccatagaaaccacttggctaatggtcccattttaagaccattggaactcgtggagtttgcggttctggttttaaaaggatatgttttgtttgtgattgtttcacagaatttttctttgggttggtgatagtttggtgttggatgtttgtatggggttcacagaaactggatcataattaatattccagattctttcttctttggagggttcagagagtgtttgtggatttgacttcattgtgaattttctctgggttggtgatagtgtgaaagggttttattttgtcatcttttgaagttcttgatggcacaatagtgttgtggatacttcattgtatcttacgtttttgtttgtttgtaacaagttgttactaacaactctttctttattctattgatacatgaataatgtgtactctccctctctctctcttcttcttcttctctctctctactgtatatagcttggtcttaaagaaacgaagatagtagctcattctaaaaaaattcatattgggtttattaggtcaatccgatcggttttagtgtggacttctcctcgaaggaccaccacactgtctgtcccgagtttggaatgctttccgactaataccaggagtagtcagaccgcctgcatttctgactacaggtaaaccaattgggccaagctgcaaaactgtaatggcaaattaggtgggactaaatggaagtttgatggcaacacaattaagttgtgtatatggattctagaagatgccgagaaacatgaatggtcgaaacatgtctacactttaggggatttggctgtgtttaatcccaagaatcatttaatccttggagtgattgctaccggtgaaattgttttctcaatgagatatacatccaaacctttttatgttttatacttcaatcccaaaagaaacactctccaaagcgttgaaatccaaggtttggagaatcatcttagagtttacgccttggtggaccttgtagaggatctttatgttaatgatgtgatgcaactcatctcaagccatgcaacccaaggccaacatatcattacgcaaaggccaaacccataacaactacgtcaaacatctcaggacctctgtaactcttctccccctgagatgaacaaccatccgacaaagatccgagtcgttcctgcgaaacgagtacgatttattagttagttaatctggagtgaggattggttctgatgaatctataactattttggataagtgtgtaacttctctcattttacaggctttgtgtgagttttatcgctatgttggcctagcattttgttctttcttgttatcatatcctaattgtagtgtactttggagtttttagcaaactaatgttttatcctacattgcgtttttttgggatcttctgtcaatatttattttctattggtttcttgaatgattgctgaaaagactgtcaatattaaaagtgttagggatgaagtagctcagggggagaaagtttcaggtttcaaatcagttttatgagtcatggttgatccttccttctcctgtttgtttggctactgacctcggattttgcttctaaaagatgttctggaaactcgaaagcgagatttctctaacgaaataaagatcattttctggttccttgtggtgtgataggaatttgtcctcaaagttggctgctcgcagattatatcatttcggatctgtcatgggaaattagccataagtttcaaaccataaacccaaatcccgcaaataataagaccaatcgaaaagtcggtgcttataattcatacaattaatggagacaaagaataatacttttggaggaagacttacataagtttagcccatagaattgttacaaaactcgttgtaaatatttgaccacgagtagttaattactttaatggttttcatgaattaatatttgaaaggtgaaataacttttttaccacatgttatgttatttaaggtttttgttgctataacggttttaccatgtataatttgttatctttttttacttcttttgctcaattagattccctttcgaaatccagaaaaaaaaatttccttttggatcgatgcaagaaagtagaaaagattctctttgctcatttggttaaggtcagggtcataccttaattaaacattttgtaattgacacttaaaatggaatatcttttcaaaaccaaatacaagtaaactaataatttttatccgtaaaaaataattaaaaaaaagattaagatgttgtaaaatataataagtgaactctacacaagattaatgcatatttaagaaaaaacaagcaatactaaaatcatattatacaattattaatgtatgatactaatgagatcatataattacatagaagtttttaaacaaaatattattttatcgaattatgttaaacattatattagtctgactcgagattgaaaaaaatattaatttataatgattattaatttatcaagtattaatttatagagaattttttgtataaactattcaaagttaaacttcaatttacaattgtgctcacttgatatattttttgttctttaagttaaacccagaaagcaaaaaaaaaaaagtcgctttgattaataaatcaacagattacagtctaaacttaaggtaatgcttttttgctgagatagaaacaaagtaaacctaaaaacaaatatgaaagaatcaatcaacaaagaggaggaaaaaaaaaagaatcattcatggtagatttgatgaagaagcgattgctttatatatacagttttattacaaaatacaaacaaaattttatcaaattatcaccctcgatttttcaacataatttaaaataacaccagatgattaatatttgcacaagccaacaaatatgtaatgaaaacccttaaaactaaatcttcacaatatgcaggagcagactatataaaagactaatgataattttgttttgacattaaaaaaacagttagattttatgctgaatattatcacatacacatatatactgtaatcaatgttgtgatggtgtgtagatgtattttttgcaagtttttttcttatcaaaagttttatttttcctaaaacagtatttaggtgatttacacagatctctaatattatctatatagttatacatttttattataattgaaagactaaaaactacccacactttttttcttttaaaaatgacttagggtctaactggtgcaaaatttggaagaaaaaattttctacctcatttttttgagcccaaaagaatgggaacaatgttaaaaaaaaatcgacctaggcactgatcgttataggctcaaggcttctatcaaaatcctaactagcgcctaacaatttttttaacattgaataagagtagttcttttttattttattttgttatcaaattatttttttccaaaagaaaaaaagattattgttgattttgccattttttcatagaaatcttttgaaattgtcatttttactaaaatcttatggatatgccattttctaacattaaaaaaagtatgtatttccgatttttttggtaaaaatacgtagtttatataaaatattaaatcctaagaacaagcacaaccgactaaacccaaacataacgaataaaacacatgttaaatcatattttcgtagtgtgaaaaaggcaaaatctacaaactattcagaaaagggcaaaatccacagataccatcccaaaaaatggtaaatccataattgattcaaagaataatatttcttacttcaaattgctggggaaaacaattattctctacgtatgggtcctaaaagaattcaaatgaaaactttcgtctaaatattgtaccaatcacacattaaattttcgaaataaattccacagttaaagtttcccacaataatcttttttttttgggcaaaacattacttaataatcaaaatacataattaagttaaaaagagaccctttaaccattacaaccattattaataaacaacattagtttttgtctttcgaaatgaagaaaacacaaattcaaacaactgaacacttagactagaaaatctccgtcttttgtgattagagattgttgttgatgtaaggatcataaacatcggtggttgaaggcatgtaactggtggaagcaagatcaacggctggtagttgattgtagttgtagtagtttctgtccacgaaaggaatgctttcacgccctccaacatgattcatatgttgttccaccatcggattcatgaatgattgttgttgattcagatactgatttgaattcagattcaaattcagattcaaatttatgttgtagaattctcgttgaatctgattaaacagattattaggagcctggtattgaacctgattcatattctgattttgataaaaatcacaaacgttagtaggaacaaggtgttgaaacggttcatgcagattttgactcatattcatattttcatattgaatatgatcagaaaatcgactgggagcagttaccgcatttgcgtccgcatcaagaaaaggagtcatatcgcccgcaagaacatgaggattggtagcattaggagtatctacaaccctagttgtagaatgaataggagagtcggaaaacgactcatcaccaatttcgtcaacaccaattctagtaggaaaaggagagacggaagacaacaacgactcaccgttttctttaatggactcgatccttccgttaagctgatcgagatatagattcatacaagatagcaaatcttgaaggtcttttgcatcataacgatactgggacattttgccttcaacacaatcaaacataaatcgtctaacctgtaattctcggttctcagcagccaaattctttagttgctcttttgctttggtaatcctctccataagatgggtttcttgatccatcatcttcctggttcgggctgtccgcggcatctccagaaactttgaagctacctttttagcaccttcccttgacggccatgactctggaaccggtatgaatggactatagatgagagcacaagcttggacaccacatagagttgacaactcgtggagtttcttgaatatcccgtttttcctcttcatgaaggatgttttccttgatctttcattagctatcaaagatagctttaccttcttcatccccatcaatatgtttttttgttttgttttgtgtggtttgtttaatttgtttactcaaagaatgtttatatagcaaagaaagatgattttatagtcactaggattcttatcactttggtggactcattaattctaaataacatccaggaaatctcttatcaattaattgaccaggtaattcattattatctatataaaaatattttttcttatctaaagtttggctcgtctgatcctaaataatatctgatgacaaaaaaaagaaaaaaatctatccatgtaatatgagggggcatgtaatataatatttttatttctaagttttgtttatactaagaattaatttctcttactctcattgtttttttttactaagaataatttctagcttactttgttcttagaatgtgaagttttgtaatagttttaagtgattgtacttttaaaatacagtaatatattgtcaatgtatatagaattgtggtaagctagaaattactctaaagtttgttatctaaagtaaatttcagaaagtttgttatctacagtaatttaaagatgtactttgaatcatacaaataaatttttagaatgggcaaacaatttgaaaatatgcaaagaacatctcacataaacgccaaaaactttgaataattgttatgaatgccctttcaacactatccttttcaataatgcattttcttatttgttattttcatttatactttctcttaatttttaatgaccattttacccctatttagaaaatgttttaagtaaaaaatgaaatattaattttttcccgccaaaaatattctgaaaataaattttccgccaaaagtttccggccaaaaaattttaaaaaaaacttttctgccaaaaaggtttcttaaaaacattttttccgcaaaaaaaaattataaaggattttaagagatttttgaaatgagattttaaagggttttaaaagatttacaagggattttaaaagatttttaaaaaaggtgtaaaagagttttaaaagattagggattttaagagatttttataaagtgtaaaaggtttttaaaagatttacaaaagattttaaaatatttttaaagggttttaaaagatttacaagtgattttaaaacattttaaaaaggttttaaaagatttacaagggtttttaaaagattaaaaaagatttttaaaagaattttaaaatatttttaaagaattttaaaatggtttaaaaattattaaagggtttacaagaaattgaaaagatttttaatggtttacaagggttttaaaggacttacaagggtttttaaaatattttgtaagaggttcataagagttttaaaatggttcaaaatttattaaggggttttaaaagatttttaaattgtttacaagggttttaaaggatttacaagggtttttaaaagatttacaaatgtttttaaaatccttttaaatcctttaaaaattcttgtaaatcttttaaaatcattgtaaaaggttttaaaatgtaaaacaaaggttttaaaatgggtttttaagtatttacatatatatttaaaaactttataaagattttaataggttttaaaatgattcacaagggtttttaacaaatttacaaagcttttaaaacactttataaggatttttaaatgcatgtttttagctggaaaaaaatttgttacagagaaaaaactttggcgggaaaaaaaacttttagcgggaaaatttcagtttataaattacttgttctcattagatgagagtaatttggtatttttgctcaagagaatgagtatttttaaaaatggactacatataaggataaaatcaagagtttaatacattaatatgactacatgtatttatttatttatttattaataatgacatataaaaaaattatttatgaaaattatttacatttagaaaatatatgcataatttgggtaaaatcaagagtttaatacagtaatatgatttttgctttttttattattttttacattcaaatggatattaatgcaggtacacatgtataaacatgattggatataaaattataatttataaaatcatgtggatattataccttttggggcattgaccagatattatatattttttattgcacttttagaaataaattttaccagctaataatgaagagtaatttagctggcattaccatatttttttatcttatttatatccctaaaataaatagctttatgtagacatgagagaattggtaagaaaatatgatccaattatagctttggaacccacatttaagaattttagactgcttttattagttatcaagataaaaacatacaatttcaataatataatatcttagcttgtagaaaagttttggtagaggtttgttatctgcttcaaaagagatttatgtaaatgtcaaattgaaaactatttgaaagaacgaattttgttttttaagcgttgcgatttttgcgaaaccaattttagatgtattaaataaataatttagaagtacatatatgaatttttggtgttttcttaacttattaacaaacaattatttgttctaaaataattaagattgtgaatagtgacccagaaaactattataagaaatataattaaattctttactttaatatgatgattattaggctattatgactttataagtaacgttatagagttgataaaatgataatgaagacaatatttttgactttgagcgttatgatgtttgtattttgagttattatagatatactatacaatgtactattatgtgtttgattttgttgttaaaacaatatttttaatatatggtttaaagtatggtgttttatattttgatctttccaacaaatatacactttccaacaacttcacgatctcgttttcatatttcttagccaacaccgccgctccatcgatttttctgatggccagaaaatgtgttgatttagtcagacggtccacgatcacccaaatagtatctttggtccgcgatacaggtaacccaaccacgaaatccatcgtgataaaatcctacttccactcaggaatgggtaaactctgcaacatgccacccgacacctggcaaacatcacactctgcgacctagttagctacatccctcttcatcctaacctactgatagtaccgcttgaggtctcggtacatcttagtcgctcctagatgaatggaaaacatgctcgcatgagcctcactcaagatctcctaccgcaactcctcatcattaggcacacaaactcgccaatgcacaaggatagtcccattagctgcgaactgatactaagaaccctctaccttagaagccgcaatcaacccctcatccttttcctgagccaatcgaactctactaagaagatctgctcgatccacagccttcaatcccaatggctcccttgcagcagcacacaaccgcaaaacaccaatctcactcaccatggcttcaacactctaccctggagccacacccacgcgcttacggctcaacgcgtctacaaccacattagctttaccaagttggtggggtatctccagatcataatcagccaccagcttcatccaccgcctccgcctcaggttcagctctggctgagtgaagatatacttcagactctaatgatccgtgaacacctgcactttcccgccataaagataagacctccaaatcttcaaggcaaagatcaccgcatccatctccaaatcatgagtaggataattaccctcatgtttcctcaactgccgcgatgcataggcaataaccttcccacgctgcatcaagacacagcccaacccaactctcgaggcatcagtatacaccacgtaaggctccccatgatctggcaatgctaacactggtgtactcgtcaacatctccttcaggttcacgaaagcctcctcccactccggtgaccacacaaaagaaacatccttccttgtcaacttagtcatcgactgtgccatactcgcaaatcccttcacgaacctcttgtaataccatgccaacccaagaaaactcctgatctcaatagcattcttcggtgtaggccagtctctgatagcctcaattttctccggatccactgaaactccctctacataaacaatgtgacccagaaaacccatctctctttgccagaaactgcacttgctcaacttagcgaacagcttctgctcccgtagcttctccatcactcttctcagatgtacctcatgctcctcatgactcttagaatacaccaagatgttatcaataaagatgatcacaaactcatccagaaactcctagaacacgttgttcatcaacctcatgaacgttgctggtgcattagtcaaaccgaaaggcatcaccacaaactcaaaatgtctatatctagtcctgaaaacagtcttgcgaacatctgcctccgctatcgggatttggtgataacccgacgtcaaatagcacccctcaactgatccaccaacaactcatcgatccttggaaaatggtacttgttcttcatagtgacccggttcaaccctcggtagtcagtacataagctgaaactctcatccttcttcttcacaaataacacaggcgctccccaaggtgaatccccaatgtcccacatttcctaaaaaaattgggcaatagttcagagtcatactataaaaagactaaaatgattccgaatacaaatgaaccagaaacttgagttcttagacgtccaaaattaaagtgttcggtttaccccagttctataaaaagactaaaaggaaaattattaaaaggaccattaaagaattgaataaaaatgtttaagcatatgccaacaaatgaaaactccaataaagaaaaagaataaattcctaaaagaaatcttcgcttaaaacgattaaactgtccactccaacgtgaacttctacgaccttggaatttgaatttcaaactttatcttgctcaacatcaagccccttttcttctacggcgtacacacgaggtcctatggcttgcctcttaggaagtgtttggttcccgtcatttatgttccgttgattcccttcaccagacacgtagtgcactcccgtgcataatggcccggctgcccacacttcctacaattattattaccttccggacaattctcccttatatgatccacttcaccacactgaaaacatttgtctgaatccatccaacaaacccctccatgctgcctattacacctagtacccttggggaaacggttctgaactggtcctgcttcacggttatcccatgtacgcttttgagatccaactacctgagttgtccgagcttgagtacttttcaggtgcttagcttctagaacaagtccactctctatccttgcaaccttctcaaccaagtctatcatgctaaaacattctcgagaagcacatcaggtcagaatgttcggcctcaatcctctcatgaatctacgaatcattgactgctctcctcttcctgctctaactgaaaacctgctaagacgactaaattcccgctcatactctctgactgtctttgtgtcctgacgaagctcctcgaagtcatcctccaaactatcccttggttcttgaggaaaaaactttctgttgaactcttccctaaaatcttcccaggaaatcacatgttgcactagtgtgttcctcactacaccatcccaccaatgacgtgcctcctctctcagaaaatgaacagcaatgtccttttggaactccattgggcacctagcattctcaaaattattctccaacaacttcctccaatcatctgctttgacgagatcaatacctccagtaaagtactttgtgcacatggttctcatgaccttcattatctcgtaataggaaggctctgccatctgagctggtggtggtggcggtggaggtggtggcggtggaggtggtggctgttgttgctgaggtagaacattttcttgtggttgctgagctgctgcagctgctgctggtgctgcctaaggaattcagttcattaactcttcaaacattcttctgataccctgaatctgtcctaacagtgatgtattgatggcaacctgatcttcgactggaacatcacctactggtggttgagcttgtcaatcagcggatgcatcttcaacacggttaactctttggttcgcaaaacgtcctcttttccttaagggtgccattctgacaaaccgaacatcaatatcagaacaatcacaacaattctaattaacaaaactaaagctctagtcttacttcttatggtgttttattatcttttagaaaaacccccttcccgtttatcaaatactaaaacctttttatttttaaaacacttcgttaaaatctatcttttaagaaaactcttcgacttagccttccgggtcagcaccggcttgactttacctggctctgataccatttgtcacacccgtctccctcaacattgagacgacgtgcttttaccttacttatattttcctctattccactttcttaattcaaatataaacttttcttaaaaagaatcttaaatcattgaaaactctgtaataagtcgtaaaataaaatagcaaataaagaaaataaaccgagattcccaaaatacaccataagcgagacggacttgagcgactacacacgattctcatcatgacctgagaaaaaaggggtgagtaatgaattactcagtgagaggatcttttccgtccacttgaaatacgatacacgattgtactttcaaaccatactcaacaatcacatagaaaatgggttggtcaaatttttcaccctctactatttacaatctcaatattcccccctgaacttttggctccttgaaatatcaccatcaactaatatattctcaaaataactaaatgtacttttggattcatgtgaaatactacgcctccaattgaactagtgattaaaccgggattaaccataaacccgcgttcgttgtaccgcgattgcgattaatccaagtaatcacccatgacccgattgagaaacgacatcgttttctcattttttcaactcttcgaaacataaggaaaacgacgtcgcttcatccacccatttgaacaagtgcgactcattttccctctaacataacataatttccaatcaacattaactcgtttaatcaacaattttaaccaatcaaaatgcatacttgtaatgcaatagcgcatttgtaaaatctacggtatggattatcctttgtctttgatgtaaatgtgattatctcttccccacaccagcatttcgagggcacaccaatgagacaaagacgacgcccagagctggaagcacttgagtagctcgtggtgctcatttttttagatttggtaactgaagaactctaaacccccaaaattcgattttccccttcctctctcaagaaccctaattttggtctgcaacaatgactttatcgattcgaatcgatttgtttagaaaataagagagaaaacaacgtcgtttctcagtcgagtcatggatgattattcggattactcgcaatcacggtacagtaaaggcggatttatggttaatcccggtttaatcactggttcaattggaggcatagtatttcacatgaatccaaaagtacatgtaggtattttgagaatatattagttgatggtgatatttcaaggagccaaatgttcaggggagaatgttgagattgtaaatagtagagggtggaaaattcggccaacccatagaaaatagacaccacactcatatagtttgcatcactatataaaactataacacacaactcattcttgcttaagcaagatctccacatcatttccaggttcgatcatttccctcacctttgaacctatctagttccactggactcgttagtcttttattgagctacaaagaacccgtcaattcaatgtagaccattttccactgttccacttttcatcatctcaaaagatgttgattccacgttctcatataacacatataattaactgttatcacaagtacaataattcaatcatcctatatttctagaacaatcatcttatcatcaatcctaattaacaattcattattactaagcaaacagatctattcctatgcaatgaatcatgaagcataaacatagaaacttgtaatcgaatctccgcagatcacaccctcaccttagcaactcggaatgggacacaaactgggagaaaaaagttgaagatgcctagacaatatctgaaacttgcagcagaagaaaacagcacaaagacaagttagggtttctgtagttttgacaaaacaactgattctgctcaacaagcaatcaacatggcaggtagggtatacctttcctagtgacgacgaagggttccgtgtcttacctaacacttcctctatcggtatccactgtcgtcttgtccttagctgatcagatatgaccggaatctgttctccaaaatggcaagttgaatctgaaatctgatacttagttatttatgggttcagaaaccgtgacttttgtccaactttaaactcgaattgtggatagagtttacctcgtaacagagatccgtttgttgctgtgtgttcctcactgtgagatctatccaacaacaccaatagcgtgatctggttccttcagatctgacgggaaaccgctcactaataactctacttggactgatatctttcttcctgttctttactaaatattcaaatagattgaatgataaaccataaatcctcaaggaactacacataatatcatgagaagagatcaacatgaggttaggatccttacccaacaagccggtgacaaccggtgatgactacgactcacgttacgcggcgatctacttgacgttgccacctctacacaatagaaactgcatccacgaaccaaaccgacgactccgatctaaatgttagtgtcttgaagttgtaactctccttagtttctcaatgttatgatcgataatggtgatgaagcaaggttgcagggacgaagacgacgttatatacacatgtatatacacacttcatgattaggttttgttgttaggtttttgttgggcctataatgggcttagtgagaaattgagtctcacattgaaaccttatattacagataaaatcttagaattaatggatttgggtagataataatatggggcgctatactataggtaaaatcatataattaacaatcaaaatataaatatacaatcttaaacactaaatagaattatttttttaaagaaacacatctcaattcttttataagaagtttatacattataaacgtaaaatggtctctattttcccacgagaacgatcgtatctagccagataaagcccgatctttgacctttgtctgtatacacatgaaacggaagttaaatgcttatttccccaccaattgaaagttcgagagcttaatgtccatgaatcctggtttcgtcggtttagtgcgtaaacccgagacgaaacaatgtttcggtcgtaacttaaccaaaaaaaaaaaacagattacaacctattgtcgttgtcttcataaaaatcaaaatcccaaaacccccaaattcaaattaagaaccctaaaaagctgaattcttaattttgtaattgaaaaccggatttccagtttaggatgagcaacctttcatcgagttcgacgggatcaacgggaccacgtggaagaggaagagtggtcgaagtgccatcaagatgatggtgcgaggaactaaattggtagtcaacataaaattgaggatttaaatcaccaagtacatagttcatgctttaaaccaacgaaaatggtaaactaatgatttaaatgacatttttcccaatgtatatatataataactacccaacactatgaatcatgatagttccttttttctttgataatattaaggacatcaaggcactaacaaacatggcaaccttatgaaagtataaaacaatttacataacaaaaaggttaagaccaattagtttaactaaaaatgaatgttatcgaatttacaaaattatacgtgatttgaagtattccattatatacattttttttgggacaaattccattacatacatgtttttttttgggacaaattccattacatacatgttttttggggacaaattccataaacaaaaaatacttcactttttttctctctctcgggcaactttctaaatctagtttttttttcttctttttttttatttctttttaatcttcacttgaggtttacgacttcaacggtgaatcaagggggagcaagcttccttctccaacaacggtgatgtgtgttattcgtcatgtgacgcatctatggctctttcatggcggtttgagaagctatgatatcgttcgctctgattcgaggacggaggtttcatagacgagtgtctcacggctcatccgccctattggccgctgcgactagcggtggaagttatccgacgacttttttcgtgctatgtttgtcaatctcccaaaatatttctgtatctagattattcttttttggttcattataaataaatatatttaattttaaacgttcatagtgtattttaaatttggaaccaataaaatgggagagaaataacacatgtcaaataaagagatgacatatgtcacaactttagaacatatgttttgtgaaaaacttattttattatataagatatgttggttgtaacaaaaaataaaataaaaaattctacttcacgggttctctcctagtttctttaatgagttatccgaaccaaataaaaacttgattcgaatccggattttattcaatcgaactgaactaatcaaaatttcatcaaaaagtaataaatcttcttaatatatttatatcattgaaacatattaaaagtctataaaataattaggtttttaataaagaaatccagccccaatccaaaagaaaagaccaactaattcctcgccttttgcaatttcgtataattatttcccaatttttgtgtttgttaattaaatctctaaatgttcgctgacttcataaatttggattacgtaaaaaacgactttcattagtaaaaagctgaagaagagtggtgaacatattgtaccacgacccctcttgttctacacatctatcgaaaagcttagagactaacaatattttatgtaagaaagttgtttttttttattctagactttcacatgataacaaaaaatataacatatatctagctagatatttacataatgattccatagtagaatcatatttttgtttgtgtgaaatgattgtaatgttttcctcatcttgaagattcaaatcctttttttcagaagttgtacaaaccacaaccaaatatctttatcttccacctcaaccattgtttaaagaattagctacaaacatttacggttatcttccacctcaaccattgttaacagttagacttttatgaagtcaacaaattcttaaagacaattggcaaacgcaaaatttagtcattttatccaaaattctaaactgaaacggagccaaaataaaattcagttttatttggtgcctaatttataaaatccaataatacgtaacccacaaatctcgaaccaaactataccaaagaatacccaaaattaatatcagatttgaggcacgtgagatacgcctgctaagatacacacagctcgaaatctgagtccttctcttctttttcgccatcggaaagttcttaccttcgatttcaatttcttgctttcttctcagttcgtcacgatcggagctttttgtccgatctcaaatgcccaaactcctccatttagttatcttcccggtagcatctaagtagcttgaaatccctaatatcggagttgctctctcccagaaaatctcgagaggttcaagtaacgaaaatggctttggtggcggctttagaggcggatcttcgcgctctctccgccgaagcgcggcggaggtatcccgccgtgaaagacggagccgagcacgcaatcctaaaggttaggatttctccacagtaatgtacaagtgtgttgttcgagcttgaattcactgtaatcattgagattcaaattggtgtttgttttagttaattcgcattataattttccactttagactctaaaattgaattgttgaactcagtgagcttggagaatggatagcatttacattgttggaatctttgttggaatgtttctggtgaattgaattgttaaatgtggagtcattcttgctttttcagcttcggtcgtcatcgagtgccagtgatctttcaagcaatgaagacattcttcggatatttctgatggcgtgtggagtcaggaatacaaagcttagtgttataggactttcctgcttgcagaagcttatatctcatgatgcagttgaaccatcatctctaaaggagatactttatacattgaaagatgtaagttggggtttctgtacctctctgcattatattagatagtaatataaagctatccttcgtcttcttcttttttatttgagttaaggcaaaacagctatctgacgccgtgtttccttacttgcagcattcagaaatggcagaagaaaatattcaactaaagactctacaaactattctaataatatttcagtctcgactacatccagaaacagaggtgaatacaccaagcttgatctagtaagaatggaagtctaacacaaaactgctggtagtcgaagttggaaatttaacaaaacatcaatcctgatcctggtctttaacgtaaacaaaacttaaaatagttttatgcatataacaatagaatgcagatgtcaggaatttttttttttttttggagtgacccatcaaataagaccactaaaccaaactgtcctgtactaatgtaaaatcattagttctccattgatctgcttgcttgttgctttgataactttagcttctttcttaattccaggataatatggtcctaggactaagcatctgtctcacgcttcttgataataaccgtcctcctagtgtttacaagtacgttgcttttataaaaaccttacctcatttctcctatattattattttcttttacttttttgttttactttgtcaaaaataaaatttatggttttgttttttttggtctcctagtactgctgcagctaccttcaggcaagcagttgcattgatttttgatcaagtggtttcggctgagtcccttcctatgcctaaatttggttcgagcagtcaaacagcaaggactggatcagttactggagatttgagtcagaatatcaataattcagggtacgtcagtcctgatcaattctgtctgttgtactcttttatcttaaactttgtactgtctttactgggtaaatatagtattagagctttgtggaattatggttatttttatacacactgggggatgaaatgattacatgccggttgatttgagcttttcctgatgaagtgaaagacataggctctcctttttgaacttacgctttagtcaattggaaccttggcatttggtattatttatttgatagactaatagaattatgaaagcaggcccttggagaaggatgttatcggtggtcgattgacaataagagacaccctgagtgaaaccggtaaacttggtctgcggttgcttgaggacctgacagcctcagctgcaggtggatctgtatgtgttacactatattgattttggtgctgtatcttttctccagctaagtatcgttaaagggatatcaccgaattaattgttatattcatgctttacaggcagcttggttgcatgttacttctcttccaaggacgttttccctcgaactaattgagtgagttggcaaggctttttaaactctagttgcatatgttgaagtgaaagttgaaaaatcatgtttaaaatgcacgagttctcaatttacttggcaggtttgttttgtcgaactatatatcagtttttaagatactacttccctacgaacaggtaatgctaggatatttcctggtgggcacttgtttttcatccttccattagcgtgatgacctaactgtaaaagtttgcctatttattcatcaggttttgcgtcaccaaatctgttcccttctgatgacatcgcttcggaccagttcagaggtaaaatcatgcctcattaccttttgtattgtatgcgtccatgtgatctaaaatataatttggattagcattaaagtatatcgaatgcgcttacttataagattttgttactgctcagctcgagggagaaatggttgaaccttattttcgccggttagtgctgcggtcggttgcgcatattataagactgtatagttcgtctctcatcacagaatgcgaggtacagtatgcaaaactttacttgttcattttaaactttgtgctattgaccacaaaggaacaagcacatgaaatgtgttctgcggatgactatgatctctgcaagttctctttactgatgtgcgtccatcccatttctgtctgtgcacaggtgttcctaagtatgctcgtgaaagctacatttttagatttgccattgtggcatcgcattcttgttcttgagattttgcgggtaatcgttacattccattattactatttgcacatgtatgtatcacagaataggaatttgtgctcaattcttttcagttcacatttctaaggtatcttgtgtgtctgtgcattaataggggttctgtgttgaggcaagaacattacggattcttttccagaactttgatatgtaaggctaaatacttctctttgtccttgtgatgtactcaatgttgcatgtttaggaaactcccgtctcgttctttcttcacactgcagttgaaaaagtttctaaatcttattggtttttcttgtgattctactaacttttactatggacttttggtaaagattgtaatgttatgtctggtgttatagaattctctgttcgtcctttttttctttccctaattatgtctctcgtgtgatctaatattaactttgtctttcaaggcaccccaaaaacacgaatgttgtggagagcatggtcaaagcacttgctcgagttgtttctagcatacaggtgggtgtgtagggcaggacgcccgttatgtttcctgtagtctcaatttgcattagttctagtagtcgctaattttgatttgtttattagttggttttagatgtgcatttagttttacttattatgtgtacctgaaaagattctatggaagaatttcaggaactgtatagtggcttgtttattatagctcaagaattgaaatcgcataataggagtaaaacttggaacatagcttaattctagagttggtttccttggaagtagtttcaggagacgagtgaggaaagtctagcagctgttgctgggatgtttagtagcaaagctaaaggtaaccaattatttgatgctatgatgattattcattacctctaaggacctcagaattcgattaatgttacttcattctaagaaagatgtcattaaatatattccctattgctgtaggaattgagtggattcttgataatgatgcatccagtgctgctgttctcgttgcgagtgaagctcatgcaataacgttggcaattgaaggcttacttggagttgtttttacagttgccacattaacagatgaagcagtagatgttggggaggtaattgatgcagggttctcctctgctattacatattctttctactctttacctgattgtctcttgtgtttcatacttacatttcttcaaaccatcagcttgaatctcccagatacgagcatcttccttcatcagattatactgggaaaacctcacttctctgtatctcaatggtagattcattgtggttgactatacttgacgcattttcccttatattatcaaggtataacaacccttttgtcagactatacattgattgtgaagaggcaaacactgaggactttgtttaaaataattgttcttgaaggtcacaaggagaggcaatcgtattagagatactgaaaggatatcaagcatttactcaggtaaatgcaaaccagattcgaagtgtccatatgttatgtggctgctaattgtcgatgtgtggaacaaatgtgtccctgctatacagtttttacattgccacttaagcgtatgttgtctacctatccagaagaattgacgggtatccttcaaataattttttcaggcatgtggcgttctccatgctgtagaacccttgaactcttttcttgcatcgctttgtaaatttactatcgttttgccaactgatgtggaaaggaaaaggtaccttgaatattttgctatatatcatatgaaagttacttaatcaatgcaagccagataactttttgttattaaatttgtaatttcagcagcgtcgtacagtcgcctgtgtccaaacgttctgaagtacaggttgatctgaaagatgtcattgtcctgacacccaagaatgttcaggtatttaatttgatattctttatttagggtttcattctttcgtacatgcacatcttgaaacaaaaaaagtattcttacccatttataattatttggttaaacgtacttggctgacctaagaccgtctgatctttgttcaggcattgagaacactcttcaacatcgctcacaggttgcataacgtgttgggcccatcatgggtgttggtgagtgttttgcttcaactatgttcaagtaatctatctcttgataacgaaaatcctaaatgaatacaggttcttgaaactctggcagccctagatcgagctattcattctcctcatgcaactacccaggtaaatttggcaaaaccccatgcaggattctgtctttttacttgtataatacaacttgatatttattatagttaggttatcactttatctttttctctgatatctgaatgctcttacaaagcttatagggcaatataatattatcttttataggaggttgcaactgcagtcccaaagcttaccagagagccttctaggcagtacgctgattttagcattctatcctccttaaattctcaggtaagccatatcaattttcttctatagtctatgcccttggattgctcttgttaaatcacttcttgcaaactggatcctgaacatctgattcttgactcattgctttcatcttgccagctgtttgagagctcagcgctgatgcaagtgtcttctgttaaatcacttctttctgcactccatatgttgtcccatcaatccatgacagaaacttcaggcagtgtttcatcagcttcaagtaaacaaattgggagcatcagtttttcggtggacagaatgatatctatactcgtaaataatcttcacagtatgttctctattgattaatgaagtacatcttcagattgtagtctttcttttctgtgctatcgccttgtatattggtctagtctctggattattttgtatactggtcattctgattaatctttgtatgccaggggtggaaccactatgggaccaagtggttggccactttcttgaggtgacacggcgttcataattctgtttatttgtaggatatcctgacattgttgtgggctttactgacacttcaactgcatattgcagctcgctgaacattcaaatcagaacttgagaaatatggcgcttgatgccctggatcaatccatatgtgctgtcttaggttcagagcagtttggagaagatccagccagatcaagagatgcaactttggatgtgagatctctcttcgctgtccttgcttaaattcgagagttttccatctcatgcagaagggaccttactttgattattcttctcttctattttttgttattcttcctaggtagactcaaagtcaactgaggtgaagtcagttgagtgtgctgtactatcttctctcagggttctttacttttctgctcaaaaggctgatgttcgagttgggtcattaaaaattcttcttcacgtactggaggtatgtataatacaatatgaacattcaaaatctttgtttacctttaatatctgacattttgcttctgcataaatcttatatcatcagagatgtggagaaaagttatactatagctggtcgagcattcttgaaatgttgaggtatgtttcctgcttactttccattttttcccacatatgtataattgaattttccattctatttgctgatcctattcctcacatattctctttaggtctgttgcagacgcatcagagaaggatgtggcgacccttgggttccaggttagtgaaggatgacttcctgtagattcgataaattagcagtagtgtacagccttagtccatctcttactttataccttgtcactgataccttgtttgttcttcccagagtctccgggttattatgagtgatggacttcctacactcccggaagactgtcttcatgtgtatgttcctatctctgtttaaattactatgttttcttattttacatgctgatacttagctgccagagatgtcaacacaattccttgtcttatatgggatggtagttaatgatattaatatctcaggtgcatagacgttactggagcttatagtgcacaaaagactgatttgaatataagtttgactgccattggcctgttgtggactttgactgatttcgtagcaaaaggactccaccatgggtctctagtggagaaaggatcgggtaaataactgtcaaatcctagtctgcactcctcacctcaagagaagctctatttttaaaaaatagtaagctgagctgttcctgcaggattcaataatgcagattccactccacagcaaacaaatggcgaggacggggaaaagcatatgggtagcaattcgggcaagtcagattatgaagctccaatacaagtggtcaatcatgagaaattactgttcttagtcttttcgttaattcagaaacttgttgatgacgaacgaccagaggtatttttcatagaccaccattttttttgtaatgtgaatttttttatttcctttgaaagttggtgaccccatcacttatattttttaatcgctattaaatttccaggtcaggaattcagctgtcaggacattttttcagattttgggaagtcatggaaacaaactttcaaaaagcatgtgggaggattgtctatggaactatatcttcccaatgttggatggcgcctctcacaaggtgaggaaataggttcaatagattcatcttagaagacccttgtgacaagtgaatcttttttgtaggctgcaacatcatcgaaggacgaatggcaagggaaagaaatcggtactcgaggagggaaagctgtgcacatgcttatacatcataggtgacaaaaaaaatttcgtcgtgtggatatcttctgcattgtcaatctctttgtgatagtctttgatgcctgaataactcgtttacatcaaaagatttttactaattttcctaccattgaacttgccatccattttctgatatgcagtcgcaattcagcccagaagcagtgggatgaaacatttgtacttgtccttggaggaatagcccgcctcttccggtcctactttcctcttcttgaaagcttacctaacttctggtcaggtgagtgaattgtaataatccttgactgccctgcagtgcttattgtttaggagaaactgaaatatcgtgaaactttctgcttctgtaggatgggagtctttgcttgcttttgttaagaaaagcattttcaatgggagtaaagaggtatcacttgcagcgataaattgtctgcagacagctgttgtgtcccactgtgtcaaggtaacaacgcagctatttgaacaatctatgagctacaatgtacactgtcatatccatatttcactctcttaactttttttttttttatgaactagggaaacttgcaacttcgatatcttaattcggtactggacgtgtatgagcttgttttccagaagtcatcgagttacacaggtgacacagcagccaaggtgaaacaagagattctgcatggtttaggtatttcaattttcagtaaagtctctacattttcgtagtcttttttgctgactcagataaaaaaattcagtgaatagaaaaggcttttaaagtgttctctttagcgtgacataatttttgcaacatttggttcttactctttcctttttttttctcgtttaatgtttttacaggtgaattatatgtgcaatcatcgaagatgtttgatgataaaatgtacatgcaattgttgggaattgttgatttggctataaaacaggccatcataaatagcgaaaatttcgaaactgaatatgtaagtttgttctctaatcatttactttcttcttgctctcaagcactcattttaagcttattccatttattatttcaagggacatgtaccccctgtactacgtcatgttttggaaatcttgccctctttggggcctcctgaacacctttcgtcaatgtggctaatcttgcttagagagttcttgcattatcttccacgggttgattctgttctgccaaatgacgaaggtgagattcagcagaacaacacaggtcactgtgcaagtaagtactttatgttaatctactctcaacaagtctgaatctaatattcttttatcaccccaggcagtgaagtattggaacagaaagctgatgcttcgtctgaaacaattccaaccacaagaattacgactaatatgtttgcagaaaagctgatccctgccttgatagagcttctccttcaggctcctgcagttgaaaagtatatcctgtttccggaagtcatccagaacctgagaaggtaaaacaactctcgtattatgtcgaacatcgattccaataggcgcattgtgcagatgtgttggctcttctcaacatgagtttagaaagggaatcatgggttatttgatttatctagttaacccaaaccccctttccctctctcaagttccacgtccttgcctagaattgcagaaagaaaaaagttcttgattttctgtatagtggttgagttaccatgtctatttaccttctgttgtgtctgggagaagtgtgtacacaaaacttataggatcattttttttttcaggtgcatgatgacaagacgagacaatccagatggttcactctggaaggtagcagctgagggcttcaaccgtttacttgttgaagatgtgaagttatgttctgtgggtggtgaaacagaactgaaaattagcaaaacagctcgaatacgcatttggaaagaaattggagatgtttacgatatattccttgttggttattgtggacgtgcactttcttcaaattctctccctgctgcaacacttaaggccaatgagacccttgagattgccttattaaacggtcttggcgatattattcttaagtcgaccgtggatgcaccccgagaagtgagtagcttggatttcgtataacatgtttgctgttatcctaatgtctgagattttaatatgatgtgtcgatttcttgaataaacaggtcctggagcgtcttgtttcaactctagatcgatgtgcatcacgtacatgctcattgcctgttgaaactgtagagctgatgcctgcccattgtagcagattttccttgacatgcttacaaaaattgttttccttgagcaggtaataacacgttgagcatgtcatgtccatgattatagcatagtcctttactctcttgactgcttcatctgcaaaggcactagcattttatacttgataatgtactagctcttgctcctcatatgagtccctaatcaactctagttgtgtattttgcatcaagcacacatagcaatatgcatatatatcatagagagagtccgcaggcacattgccatttctgctgcagaagattaggaatgtccatggatttggtacccattcctgctccctgtttaacatactgatatcaattaattttttagtttcagctctgaaaccgagaactggcactccacaagagcagaagtgagcaagatctctatcaccacactaatggccagatgtgaattcattttgagtagatttttaatcgacgaaaataatctaggtaaggctctccattttcttataaactccaacatctttttcgcttgccattccttaatcagtggttatcttttggcaggcaaccgtccaatcccaacagctagacttgaagagattatctttaccctccaagaactttaccgcctcagcattcatcctgaggttgcatctgttcttccgttgcaaccctacctgaaaaacgttctacgcgaagataaccgtgacacccgtgcacacctacttgtcctttttccctctctgtgcgagattgtgttatcaaggtaatataacttctacaattattgttttgtgttcgaagcacaaaagggtgacagcaaattctctgtatggaccctatcaagttaagattttgagagtttttttttcaccagggaaatgcgggtgagagagctggtgcaaattttactacgagcagttgctacggaactaggcctagaaaaggttagtctatccagttgatggcaatagatgggaatgtttctcagcagatttgagttcttacattagattcttgagaaattttggttttataccatataggttgtattctttgttttagcgtgttctgaattactctgtgtgctgtattctacaatacgccattctccgagattttatgttggtttggttcaacaaagtactctgttaactgattctgagaaccacggttcgatcatcaatacagtctagaccatcctaacctgccttcgtgtacttggtccattgacgatgtttggttaacttgtgctatttcattctgatcttgttgaaaataaatttgtgtttcaactcgtatatgcctattttaattaggtaaaattaaaaacttgagaatcttatatagatcaacatatatacatttgtttaagtttatataaacttgcttctcaataacaagaaagaagaattgcatcatttggactgattgatccgagcggcggcagcgacagaggcagccacaccggttgggtatgtagtgagatgaggatcgttcctcatctcggcgccagtcactccctctgcgtcctttctcgttgctgctttatccgatggtaatttgctactcgctccctttcataatcattgtttcccaaaatcgaaaaaaaacattagaacccgaaaatgaaagaaataaaactagatattggattcaagcattttatgtatcacgtcttatgtgctattacttacagtgagaacgtcggctagcgtagtcttggtatcgtcagagccgatacgagcattaagagtggcggctgattgagctgaagccgcaacaccgccgggcatgatattggtccgccccgtagctctaacctcggccgcttgaatggcggctgcgtcactccactccaccggcttattccctgccgtgagaaccgctgcctctagagcctctccaattgttatggttccttccgatttcagaggattagctaccacctttttctggttaacttctccctccgcctacaaatttaacgttctaattatacaaattatgatattaacacaacagcgatgatactagcacaaaccactagattatatagtcacaaatcaacctgttcaccggaggcctcggctacaacacctttctctttgtcctccgccgccttaatgcctccctccgttgtcgaaatcttctctgcctctccttttacatcagcacaatctataggtttctgcagctgttcttcgctcattttttggggtaactctttctctcttttcctttttttctctaggcaacaatatttataaatgtaatggtcagaatttatataagttttgcattagccattcaattctgtgactatcttacataaacaacaacaacggctctcctcaactttctctgattttccctcttaatttagccaataacaatcaaacatatgaatgattcggttcggttttcactgaaccgaagaaatccaatcgatttcgctttggttagaacaatcaaaccgataattgaaccagttaaatactatccggtttagctaactcaatcaatcggttagggtcttttaattagggttttaaagtttcagtctctctcacttcttctttcactcacataacaaaaaaaaaaacttcgttcacttgccgcaaagtcgccggaaccaacttacttagctcaccgtctcgccggagtttcgacaatcaaaggtttctcttctctccctgtttcacatctcacgacggatcaaattagggttttcaattgaatcagaatcagtgctggctctgtttgaatctattgttccgaatttgtgatttaatcttctaattagctttgttgtatccattttggagcaatcattcaatttcataatatctcaaataccttgattgatcaatagcgagaagaagcacgaagaatgaatcaaaacgccacgttgacggtggaggctagggatatactgaaagaaggaatcggtttgatactttggcggtggactgctatgcgagccgccgtcgaaaacggttggggcggccgagactctcaagccaaagccaacgaaaccgttgccactgttttcgactttttcatccaatcaaaaggttaaaaactctaattatgcatacacatgacatctagtcatattttaatctatcaatagttgattagtttagtgacacaattagagatgttggctttctgattacgtgtagatccagtgaaggacattgagaaattaggtgaccttctagataaaggtcttgatgagcttaatactacagctgaagatggaagtgtcgatgaggtatttcggaatcttacgctaatttcgtgattctttctttaatggggactgataagttttggtttgtgatgctactaaaggtggcgaacttactagtagatttgtacgaagattgctgtaacggtaactatgaaatgcttgaggaactaagggcaacttattctcagacgagtgcaagtgttgtcaaggttaggttctttctactacttccgatactgtcttgtccctttcactgagtttgagctcatgtcaagtctactttggtttggtttttaacaatctagttaagatagtttccgagagttagaattgaggctgtttagtttcttataccaattatggtgtttcaggtttcaaacggtgatgacgaggaaagtgatgatgaagatgatgatcaaaccactgacatgatggtggatgcgtctaaccagaaacaagaagccatgcctgttgatgaaccagtagccgatgatggttggacggttgtttcgtctagaaaaaacaagggaaagaggaattaacccggttttgatccccaaggtgttgtgtaatttgaacagttttgtttgggttgctttgtttatttattttgataatattatgatagtatgacttgtgtaccgtcactttataaactaaaatcataagattgagttttcacatattaatctactctcacataataatcttatgatcccatctttgacgcctaaaaaaagactcttaccagttatcatctcctccgcttcaagataaatgtttttttttctttttaatagaatgtaaatattcatttcagtggaaagtttgagttacacaattaagcatagccatagtcaaatatggtcacacaaatatggtcacatgccaaaaaaaaaaacagaaagataaacagcatggaagcgtaccaccttcttacaccaaatgatcaagttggcttgtgggtcgtgggttcgtgtgctcttggggctcgccgagtaattttggaccgtggattggcttttgagagttgaatcttatggaaatattctattttggcaacaacttgggaatcactacaagtaacttggggaatattctaagaatattctctcgaaacctacctcctctactatataaagaggcattcgtctctcattatttctcaagctgtcaaacagaaaatactcttagttctaaattctcgcatctattatgtttcttaaaagtaagttcttagtttagtagttttttagaatatatcgtagattaagtttgtttgagcctattattgtgtgctcgggtataagtttgtaatcggttgtatctaggaattcataaaccgtgattgtccgaaagcacttatggtcgacgatttattgaattaagaaaaaagatataatatcttgtttatgtgatttactttttgtctttaaatacagttgttgtaattcgttgttcataccgttattttaataaaattggcatcttttctcaatttggttttgcattcttacaattttattatggccgattaaatgaattaagattgtagaagcgcaaaaacaaagttgagaagaaaatacaaattttattaagataacgataacatgaatgaattacaacgactgtatctaaagacataaaataaatcacggaggcaggatctgctatctttttctttaatttattaaatcggctgtaactactttcagacaatcatgatttatgaatcccaagatacaaccgacaaactaatacccgagcacatgagtaatagactcacaatgactggatctaaagacataaaataaatcacggaggtaagatctgatatatttttctttaatttattaaatcggctgtaaatactttgagacaatcatgatttatgaatcccaagatacaaccgacaaattaatatccaagcacatgagtaatagactcaagcaaacttgatctacgatataatctcgaaactattaaactaagaacttatttttaagaagaaagagagaggcgagattttagaactgatagcgttttttatttgagagcttgagaaataatgagagtcaagtgcttctttatatagtagaaggaggtaggtctcgagagaatattctccgagtactccccaaattacttggagtgaactccaagttcttgccaaaacatagaatatttttgtaggatttaactctcaaaattgggcctatccacgatccaaaaattactcggcaaggcccaagagcccacaagcctatgtggcccaaaagtcgacgatctgatgaccatccctcgtgcctagcttggttcgatttagcccaagttactcactttacaccctttttctcatataagtcaactccgtttttgatgtatgagtataacatcttgcagtactcattaccatatttccattgcacaattgatctgacaatttcgtttggcaggaattggcaggaaagccgccggaaagtcactttttcaaaaacagttccaacaaaaccatatagacaaaatcttagtcaaccaaaaagattaataaaattatacaagaaagagatataagcacaatctacatatactaattattgtacatcaaactggattaggcttattgtagcgttacacgcaatatactattttttcatgttttggtattttattagattttagtaaaatatctatatttatagtaaaataaataaatagtaaagtatactatatattaatacatatttatagtaaattaattttatatatagtaaaacatataaaaattaaatgaaaaatgtaaaaaatggaggttccttttcttgagattgaaatgcaattaataaataatagtcaacaatattcactatttcctctatataagaaggccactagctctaaccagattcaagttaatcaaaatgcttgtgtggaaaccacactagtgaaagagatatggcagagactacaaaggagatgccaaaatcttctctatggggagaggttgaggtagaagttgacatcaaatctcctgctgaaaaattctaccaagtgtatgtaggaagaccagaccatgtcgctaaagccacttctagcaaagtgcaagcatgtgatctgcttgaaggggaatggggcaccataagcagtattgtcaactggaactacgtttatggtaacaaattatgaatttataattctttaaaatatcgtaaatatttggtgattttatttgtgaatgttttgagtgtagcgggcaaggcaaaggtggcaaaagagagaatcgaattagtagaaccggagaagaaactaataaagtttagggtcatagaaggagatgttttggctgtgtacaagaacttctttatcacgatttcagtgaccccgaaggaaggaggggttggaagtgtggcgaaatggcaccttgagtacgagaagaatgatgtgaatgtgcctgaccccgagaattttctccctttcttagctgagatgactaaagagatcgatgaacacctcttatccgaggaatagacatactctaagtcttgttgatatctatttctcttgctctggctagattaaagatgaaataaagtttgtgttgattggttaatgatatgtcatggtgtttggatatttgatgttaagtttttttttgtaagttgcaatttgtaacttttgaataaatgttttgaataataataatgaaaggaaataattggaaatttcataaaacttgttttagtgctattcttgggaatttttcttgtttttttggtactgctaaaacattttaactacgaagttaacgcattatagaaaactagttttttataatcagttattacattaaagaaagtttgcaaaattgtaaataatgtttcgcaattttggctcatttgaaccttaaataatatctgacgacaaaacaaaaacagaaattttgcaaaatgttgttgattaagcaagtggagtaattgagttatccattgatctgattttgattttaggttaaactctattagcaatagtaattattaaatcttataattaggaagtgtttttttttttagtgacctttagaatcgcaaataaaaaaaataccaaacaaaaagagtttgaaagaatctaacagatttaagaaagtttggaaaactcaattcagcggttacgattcttttgctctatcagcggttacgaagaccatttttctttcagacgattataggacatgtgtgaggataaatacatcttgtgaatagtccttcttttatttgggagtagtacttatcaagtcttataaatagggagcgttacttatgtgatttatgacctttaatcttaaataaaaacaagtttaggaaaatcttgatttttaagaatttaatggatttaagaagatttggtaaacatgcattcggtcacttcagtataatcctcgtacgagttgtagattggtctgactatcagcggttacgaaactattttccttttcgacgactatatgacacgtcttgtgaattaagatatgatgaacatattgtaaaccgttcatatattataaaaccagaaaatttagaagaaaaaaagagagactcatgcatgttattaaaagggtttagatcagtacgatgttcaaaatttctttaattagtagctaagcttttgcaaaagacctaagaaatttacatggttttttttttcttttcagtctaaagaataaaggatatataaagattaagaagacatcagaaactttacaacatcattgacaatcaaagaaaagatttcaaaaactaaaccgatggatgataagatattttcggaccgtaaacccaaaagaccgatatgaatataatacataaccaataacaaaaagagataaagccgaaacaaacaagagaaatgaaactatagaaccataatctagcacaaaacaacatgcgtactaccaaaccaaatgaaggataagcttgtcaaagtagcgtacggaaagggaagaaaaaccacgagaacggagagcaactcttctactaacaaatgaatcctacctctctaagaaagaacgaggtattagtaccaacaagaaaaaatctagggcggaataactagaaccaatcacaatttctaaaaccggcgaaaatgaagaatacgaaaaaacaacgatcttttaactcttaataagaaataaatgataacttgaaatcttgatcaagaaaacgtcacaatttccaacaacggtgttagtcggaaatggcatatccgacaaagttctgacaaagtcaaatttgtcggaattttttggtctaaagatcggagcaatcggtaaggaaaactacgtttgaaatatcacttccaatcatacacttcatcaggtgcgcatagcgtagatcaggttgtattaacaaatttatttgaaagtgttgagattgatattttatgggtatatgtgacatttaagattttttgtaagagggggattaagcaacctccggttaacccagcttaaaccaaaaatggatcgaaaaaccagtaaactcagcccaaagatgtaagtctgatcagatcgacaccaacctacaagataaaggaaaagatagaggcaatctaggaagctaagttataatacaaaaagaaagaaaaagatagattttcgatagagaaataaggaaatcaaacatgtatatgttaaactaactatcactttcttataaatagagaagcacccctttgaaagggaaatatgtggactcatacacaagatcaaccaaaacacctagaaaaaacccttataacataaattatgaatgacttgatcccttatgatggatatataaacaacctacataaggtgcaactattatatatataaaatctcaatttgtcatcctacttttgttgttaaacttgaaccttgttgaaatcctccttaaaaccgacttgatttatcaccttgtttaccacaggtgatatctcaaatctacagatatcaacacggtttgtcaatatcgtataagtgatgactaccacatttgattaactccggagaaatagcttttttgtgctcgagtgtcaagtacatgtacctacaagagaccaaccatgtaggatcatagattacttcaaaataaagcgttgaatacataattttaatatagttgaaaatgtagtaagtctaaaatatttttttggtgggcaacatctaaattatttgttttaaagttttttcaacattatatatatatatatatatatatatatatatatattagaatggataaaaatatagattccattcattctcttgccaaaacagttgtagcagcagaatttcttttaagtttattcacatttttataatgactgaaaatttagaaaattactttggtcaatcaaatttattttattataaccactgacacttcacacaatggacagaaaaatatcaattttgttttgacgttttcatctgtaccattcgagcaaagaatgattctttgcgtgacaacttcgacaagtttatagaaagtactaaaatccattgcaaaagcaaaaagtttatttttctttgctcttctctttggacgttttcgccatattcgttgttattattctagcaaagactgattctcttgcgatacaacctgtgaaacctttcttaaatattataaaggttttaaaatactttaaaaccatgattgttataaacaacatgtcacatatggatgaacagtccgctggagatattaataaattgtatctatggatcttctttgattagttctcgaaattagctggactatgaaactaaaatctatccatcaaaatatatataccacataattactttaattcaggggataaataagtaatcataagaaaatcaaattcaagcacatatttttgttgaagagttaaccctctcaaagttgttaaataggtaaaatttagaattttctctattataacagatgatggtattaattcatgtattcttttaaccactcaaaactccaaagagattcaagttttatccaaaaatatttgtggagcctatattgctaaaaaggttagaacaatcggtgaataaatatggcagagaaggtggaggtgaccacgatgcccaagtcttctcttttaggaaagcttgaggtagaagttgagatcaaagctcccgcggcgatattctaccacatctatgctggaagaccacaccatgttgctaaagccactcctcgcaacgtgcaatcatgtgatctccatgatggggaatggggcaccgtaggcagcatcgtctattggaactacgttcatggtaatttatatgacttcgaaaatattttttgaatatagaagatttgattggtgaatgttttggttgtagagggacaagcaaaggttgcaaaagagaggattgaattagtagagccagagaagaaactgatcaagtttagggtcattgaaggagatgttatggctgagtacaagagtttcttgatcacgattcaggtgaccccgaaggaaggagggactggaagtgttgtgaaatggcacattgagtatgagaagattgatgagaacgtgcctcaccctgagaatcttctccctttcttcgccgagatgaccaaagagattgacgaacacctcttatccgaggaatgaaaacatactcttggtaatagttatatcttgtgttgtcgctatatataatttattgcatgataatcatatgtatggggtttcatagttgatgtgaatacttttcaaagtatggtgtgattattaataattaataaggaaactatataatatatatttatttttgttaaatgttataactctcttactatgaactatggaggttttttcgtaaatgatacaaataaacaaaaaaagatttgaagacatagaggagaattgtggaagtccgcttggcccaatgattgactaaaggttcattaatgcttctacatcaagaggtttggggttcgagtcccacctactacgatttattagcatatttgtagattaatggagacaagtgtgctaatggagacaagtgtgcaggaaatctccaacgatatacaattatagccgttcctcaggattctacgcagtgaagatattgaaggtgtccatcaagagtatggagaaagagaaggaggtgtcgtctgtcgtggatataataagatcagaaggaattgttcgtggtagaatcgtctatatcacagtttcatgatttgcgattaataataaatctagacagcaaaaataaaagacatagaggagaatgcatttggttgagtaattgttggcgttggctgtaagtggctgaaacaaagtagagagagttctactttgatttggttttggtaaatccaataatatgaggtcaaaatagtagacgaaaacaaattattataactgaaatgcatgaacacagatcaaaccaaaaggcaaaagagtcaatgaaacgttcatgtagattattctgttttattaaaattcatgttttcgaccaagaattgcaatggaagtagtcaactaaaattattcataatcgaatatgcaactttttatacatttcacattgaccagtaataagcaaattgaaatcttggactcttggaacgaacgtctcttattacacacgaaaccggcacacgtccaacattcattcaataggcaaattctctgcttcatatctaatcgaatcgaacagtttagtcgataaataacgttctcctccactaggaaaaaccacctgaaaaccggacattaaccgagatattcaacaaacttggtatgttttcagtgaacacaaagcttataggtaagcagttagtgaaaaagcttaccacaatgagtttccccgcgttttctggccgctttgcaacctttaacgcagccgctgctgcggctccagaggatattcccacctgccaaatgaattatctcatttatcagaaacttctcctttttttctgccaaaattttgggtttataccgacaaaaagaagttaacctattgtaccagtaatccttctttgagggcaagaagcttggctgtttcaatagcctcttcacctgccacctaaatcaaaagattccagatcttagattatttgttcaagatcaagaagtagatcatatcaggctacttacttgaataatttcatcaacaatggttaagtccaaattgaatgggacgataccagagccaattccctgaatcaaatgtggacctacaaatatgaagtcccataaaccgatattataattagaaatgcaagaactcggacaaaagaacgatgatcttatagataacttggcgcgtatgttaatgttgtcactatatatatgtacattaaatctcatacaaaacaacaaatcaatactatatgttgcataagatctatcaaatgttcattttctgacctggttgacctccgctaagtaccggactttctactggttccaccacacaaacctataagatcaagattgtaaccgagttattaaaaaccgagtttttggttgtttttaagcgttagtgaaagtttttgtaccttgatgtctttgttctgctccttgaggaacttccctactccagtagcagttccaccagtccctacgccagcgaccaatatatctactttcccggctgaatctctccatatttccggtcccgtggttcggtaatgaatctgcaagatacaaacttgtgttcaatgaagacatagagagactaaaagcatatacataattgtgttggatgcatgatattattttatcaacctcggggtttgcaggattttcaaattgttgtggaatgtaaccaccaggagttttgcttaaaatcgcttcagttttctccaacattcctttaaggcctatgcgctggtccgagagatgaagctctgcacctagtgccctcagaatgattcttctctctaagctcatagttgaaggcatcacaaggatcactttatagcctcttgcagctcccatgcaagctaaaccaatcccggtgttaccagcagttggctctatcaatgtactctataatcaaaaacaattaaattccatctatgtattctttataaattatggagaaacttttatgataactttaaatgttcatattaacctttccgggagtaatcaatcctttgtcttctgcatctttgatcatactatacgcgattctgtctttgacgctagaacaaggctccatcatctcaagcttcgcagcgatacgagccacgcaaccatcaacaacattgttcagatacaccattggtgtgttaccaatcaactgcacaaacatagaaaaagattttagacatgttctttgtatcataaaaaagcaaagtgatacatatataagaaattagagattattacttcagtgatatcgttcttgatcaagcaccgatcttccatgttggtctgttttctgaaactattgaaaaatcaatatttgggtaccaactactaaagaacaaaatggatttatgaagtccaataaccatagaataagattcaagaatctagacacaaagcacaaaatactcaatggtcaaagtttgctaacagactctatttacaatgcacaagtaagattcaagaacaatcttggcaattttttggttatattgtttcataactaaaatttttaatatggaacttctaaactctaaagtagataagagacaaaataaaaatttagtaaagaacagtgaaaactagataaatttgataccaaaatcaagaaatgatagtaagactaaatcagaacgaacaagaacaaaaaaaaaaaagtcgtacctttgcgtttaaacgaattattagtgaagaagacaaggctgtattctagattaggatatatagagactaccctactttgcatgtggtgcacactgaacgatgttgaagtatgaagacgagtttatgtcatcattcttgtataataatgttaaaaatttgacatctaaagagtttttgtcatattgcgtaatgagagcatccaatagttgtattttgttattaaaacaaaatctgcagataaacatttaacactattattaaaatgtttaagagcattatattgtccttttctctagtactaatcatgtgttacttatccgaacgatcgaataatattacacctaagtggtcacagatcaattttttaaccacatgattttcttaacacaaatcaaattttcataaccacatgctttttcattttatagaatacaatgtgtcgttatagtaagttagtgacacaatttgcttgcattggttgcccaaattacttgaaattgcagaaaagtttttttttttgtatgaatgtaaaattatattcaacaaaaaactgttttacaaaagatgtaacattaagaataaaaagaatgaaaaaaacagaactacttagacagtcttgggaatacagttttgattggccgccttcaagcttggcaatgcccaattggtgaatggtgctgaacattttgatcaatgatttttggagatttttgcttcttttttctttggacaactgtttaaattttcttttttgtagaaacacacttaaacatgttcttgaccaagtgtagttagctcaattgataattatcctaggtgaaatttagaggtcgccggttcgagtgacacttgggacgaaactaatattacatgttgtggtttcgggcctggaaagattatgaagttcggtacaaaaccttctggtattcaaaaaaaaaaacaacatgtttttgaaatgttaggtccgaagaaaacaaataatcaaaaactataaacatagaagagtctctcgtttgtgcggagggttgtggtatgtgtttattgaagaagactcggtacacatgaattagggattaaaccggattcggttccggatttattgaagaccgttagtgagttaacagagttagctaaaagctctgtatcaaaacaagctctagttaatgtgtttgtatctaattttcaattcaattacaaacaagagtcatgagtgttgatgtagggatcacacaagtacgatgtttctctaggaagagttaaagaatccgtctcggttaacaggccgatgactagacgagaatttcttgactaagggacgtggtattgtgacggaatgatcgaaacaggatgagatcggcgatgtgtagacaaggcgaggtcttggagacgaggtgaggtcttgaagatgaggcgaagtcttgaagacgaggtgaggtcttgaagacgaggcgaggtcttgaagacgaggtgaggtcttgaagacgaggcgaggtcaatggttgtactgctgtcctttctctgtgtcagcgggaattgcgcatttcctttcattcctttccattcttgtacttataggacctgtccttttagggtttcctttttatgcttgtaagtctttaccactttttccactctgcacagtacatctgtcctctttgccctcttcctttggtcgatggaacactccagatcttttctatcacttactgggcttggtttgggcttattatgttcatgggccaaaaccgaccattaacaatgagtaagatttaacgtttgattgtgacggtctagcgatcggattatatcaaaattagttaatgaacaacttataattgatcatcaaggaatatgtaactcttattgattttacaatgacctacaataatcaaaatgtaaccttggtaccaacatctcttattgaatcctacgttactactactcattcaactggcaaattctcagcttcatatctgactgactcgaacaattcagtcgataaataacgttctcctccactaggaaaaataacctacaaaccatacaatgatcgcgatatttaataaaccaggtttgatttcggttacttcaaagcttatggtcactcttaagtcaaagactaagcttaccacaatgagtttccctacgttttcaggccgctttgcaacctttaacgcagccgcagctgaggctccagaggatattccaacctgccagatgaatgatcgcgtttatcaaaaactccgattttttagttacttatttgtaacgaaaaaagaacgttaaaaccaatggtaccaataatccttctttgatagcaagaagcttggttgtttcaatagcttcctcaccagtcacctagattaaaagattgcatatctcaaaatattgtttcgcgattgagaagtcgacaatctaagctacttacttgaatgatttcatcaacaatgcttaagtccaaattggctggaatttcaccagagcctattccttggatcaaatgtggacctgttgatcaagaatcatcaatgatggatagagataatcaagtattccaagaaaataatgatgtttattcctcacctggttttcctccgctgagtaccgcactttcggaaggttccaccacacaaacctattatcaagattgtaagaaaattatgttaaaaataagatcctatttcctatggttgttttcaagaattattgaagttttgaaccttaatatctttgttcttttctttaagaaacttccctgttccagtaaccgttccaccagttccaacaccggcgactaagatatctactttccctgctgaatctctccaaatctccggacccgtggttctataatgaatctgcaagaaacaagtttaaactcaatcataagagaataagaatgataactatttcaaaaatatagttggatacataatattgtataacctctggattttcaggattaataaactggtgtggtatgtaaccaccgggagttttgcttaatatctctttagctttctccaactgtcctttaatgcctatgctaatgtcagtgagatgaacctctgcacctaatgctcttagaatgattctcctttctaaactcattgttgaaggcatcaaaaggatcactttataacctcttgaagccccgatgctggctaaaccaatcccggtgttaccacccgttgcctcaatcaatgtactctaaaaacaaaacaagaaaaaagttattccatatatgaattctaatggactatatatggagagattatatagtggtttgtacatgtgttgtcaccgtgtcataattcagagtgcgtgtgtaagttgtaaacgataaaagaaaaaaaaaaaaaaaacaagtctacaagccccggttagtgatttttgaaagtgttgtctatttaacctttcccggagtaatcaatcctttgtcttcagcatctttgatcatactatatgcgattctatctttgatgctagagcaaggctccatcatctcaagcttggcagcaatacgagccacacaaccatccacaattttatttagatacaccattggtgtgttacctatcaactgcgtaaaatgcacaactatatttaagtaacaacacaagcaaatgattttaaacatgtttcttgttccaagaaagcagattgatatagaagagattagatagagagttttacttcagtgacatcgttcttgatcaagacgcggtcttccatgttggtttgtctttggaaaactccttcagatttactatacacaaatacaaaaactgataccaaaatcagaaaatggacgaacaagcagaactacattatcttttcttatggatgaatggagaaacaagaaagaaccaaaaaaaacgtcgtaccgatagagtttaatcaatgaagaagagacaaaagaccgctaaatctaaaacaacaccaggccatatatatatagacgcagacatatagatattgtatatagattcgtattgagtggttgtataattgaatcgtattatctaaattagtaaattgttatatttttgggatgaaaaaaaaaacaaaacactctcaaacaaaccaaatcttgttgtaagatattcattaaaaagactcttgacctcacaaacaaaggcgacaacaatgtatattgtggttaaaatttttctagtaatagtacaaacaaatgtgatgtatatctaaaagttacaaaaatcaacgaggctatgaagtttaacacaaaccactaaacaacaagtcctggtcggtagtgaatagtttagcatttaggatttaagggttacgatctattgttgtttgtcatgtaaataaaggttatgtgttctatgttagtggtggcgtttgtaatggcaatagcgacggtggtggggaaaaaaaggtgatggttgctaccacagtggatgtatagttctgtcgatgattgttattttatcgtaaactttaaatgtgtatatatatatatatatatatgtaattgtgtttgtttgtttagcacttttttgataaagtaaaatgtattattacttggtaaggtttgtttacttcgtttagtttcaaaagacagtaaccctaaaatacagttcaatttttttccaaatatcatttctagtgtaatttattttcacttataattacattttaatcattctttttctttctcaaatttagaaattatacatagttgcaaatttagctaattgaacattttatataataagttagatgatattacgaacgtagaaaaataaaaaataagtatttagtagagtttcgtttaagctttcaccattagtgtattttccccataaatgattagttaacatccttcaagtacaaataaacatctctattattgagttgtcaatttaccgaagaagaattattaatttattatatatatttttattgatagcactaaatgtttttaataaaataatactatataaaatttgaaaagtcatatgtaaaataaaataaaatttctaaaatgttttgagtactactattcatatttcataacattaactccaattatttggtattatataatcaaacgatcttatatcaatgtccagactaattttcataaactttataaaaaaaaagaagagggtagtccacattggaaaaaataatactccctctttcaactctgatgaaccaatcaaactggagttactggaccaccatgaagtagttgatctagactctagagtgttgaaaaatgatatttctgcaaagtggagtgtgaaagagaaaatgaaggtcggtggaagatcgattgacatgtggtggacacacacacgatgtatataattgtgtgtagtatgaagaaagttttgtgccattgctttgatatgaaaataacatctaaggctaggctgctatggaattgtgaagtattaaagacaagtttgtgccctttctagtttgtgaaaataacatccacggataggcttgtatagaaacaaaatctaaaaggcgatgcttaaaagtagagcttaaattctaaggctatgcttgaatggagacaaattcacaaaggtgttagccggattttaacaatctttcatccaaccgcctttatgttccgatccatgctttttattttggggttttaagaagtaagtaaagacaagaaaaatatccaaaggcgttttcaaacattttgaagataacattaaacactatcctttgaaaagcttaacactagatgcgcgtacccattctcatgctttaggttatgctgctaaacgcaaacgtaatcgttgttctagttgcccaaatcgtatcattattgcacaaacatatacggtcatttaaagtacatagccatatttatgcatgttgagtacatatttatgtatgtgcaaggtgcaaatggtttcatgaccaaatatctttaatcttctacttaatcactagataccgcgggttgattatttacgttataaattatattatttttttaattctatatcatctatatttaaataatcatattatattttgaatttatcattttactttttatatctatttatttttgatattatatttgtatttgtttggtttgatcttgtttaattaagaaaaactgtttattatacgcacattatatagagagtgtatttttatggtacgttattatgtgtttgttatatagtatttttttgttaaaaatgaacgtatttggcttaaaatagttttcttaactaatacttatatacatgttttttttatgatgagttattacgtgcgttcttaactaatatagatgatattaaattaaaaaagtaatttaatttcaaatggtttttacaatataaaaaaaaaaattctagagttcaaatattattaatattataaaaaatttatagattctaaatattataaataccaacttattaagaggtacactgcgggttgattcttttccatttattttataatttataaatttatgattttgtaaactataaagtatatgatatttaataagatgtagctcttatagtattattcggcatttactatatagctaaatatttatatgaataagatgaatgttattaagttactatcataaagttcaaaactaagtaagtttaactaaattgtaagataacttaaagatcgtccaaacaaaaaatatggtataggatttaacccgtggtgtaaaataaaatgaaatttgaaaactaaataaaattataaactaaaattaaaaaaaagttctttgggagaatctaaaaataagaaagttctttgagagatttggatatagaggatcttttttttcaatttcccttaatcataaactaaaataaaataaattacaaaattatagtttttttcttccttttttttgtgccaaaacatctaaatagaaaagattctttacatctaaaccccaaaaccactaattagagaaacgttaaaaaaaatttcctaagcaaaaatagaaaaaaaaaaaaaaaaaagaagaagaaaggttttgtttctctttctctccgccgatggttgcgcaagcggaatcttctctcagcattcacctcggcgtttctcctttttcagcgttcacgtcggcttaaaaagttgcaatacctaaaagttcaaagaagagggcaacatctccatcttttcccatattgcatctagaatgatgggagagaatctaacgcttaggcataaggtaaaccttttccaaagaattcaagtaatcaacagctctttctctgttcaccacaataaaagtatgttcatcgatttcaattttagacaaacccttaaaattaaaatgaaaatcaaaagccaaaatcaataaaccaaaatagaggataaaaactctgtcaatcaaaatggagataagaattaagaatactcactttcctcaccaaagctcaagctcatcttcagtaatcgcatctctaacaacacgcttatctctcgatcagtcttagcaccagaaagcatcgtcaaagctccattagaagtgattaacgaacctttctcatactcaatagcttgctcataaagctatacaaacaacaaaatcacaaactcaatctattaaattcgtcacacaagcactgataaatattctgtatagcaaaacatttctagagctatgcataagaaataccttgctatatgagaattcggagggatcatttagactgaggcaaattgtggttgtggtaattgttcgatatgagatggttatttatagtggatcatttagacgttagaatgttctagatattttaatttaggtaatattctgatattcaaatatcttgagaatatatgcttgttattagtttacaaatctaaacaaaaaacaatacccaagtgttaatgtggttaccttttttgtagggaaattttgccaaaagatatattaacaatgattgacgaaaattaacgaaaaattgaactcaaaatttgaaaaaatataaattagttatggaagatgctaaagattaccatttttgtaggaaagaaatcgatcacatttatgtttttagatatgacattaaaatattattacagttttttctagaattcaaataggaaaccatttgatttgaaaatagttgtttgttataactacatatacgatttatatattttcaaatcaaaaactaaatattgtttaaatatttttaggcgtaaagccaattaagaacggaaatacagatttctctagtatattgtgtgtttatttgaggtaacagaaattagattttgtgttgcaattgataaaagaagaataaattttggtaagatatcattagcatttaaaactaaaattattttcgaatcaaataattgtagatatggttagttatgattgatttccgggttttgttaattaggaaattagcataatgaatttcgtatagttttagggattgatttgtgcaatttatgagggtagtagttaacaatatccatgtttaggcaagtagttagtgcaatatcttaattgtttatcaaaaatttggttattgtcctaaagaaaatattttgtctgattgattttgtagggactaaccatacaatatcgaaattgaaaaaggatttttcgacacaaatcgtccccaaaaatgtatatgtagatatatcaaagagttataataataacttcaacaggtaacgaagagaagacataacaccaaagattctacacttgacacgtcttcggaatacatagatcaaactccaaaagaatacatgttaatgttcattaatcattagatgtataatatcatattatatgcatcacacaaaaaaacattataaatagcacaaaagagtttttttttttttttgaactctaccaaaaactataatttatcagctaagaacaaaggttattcactcctaatcgacaaaattaaaaaaagattcaatcaagaaaaaaaaatactaaaaccctaaaaaagatttcatcaccatcagaaattttcattaagattattacttttgctaatactatacctcaccatcataatctttcttcatcattttctcataacttaaagaacccattgtagtctttccttatgcatcatcctccattaggcattgtctttaactcattcaccgtggctctaatctgttcttgaaccaattctaatctcctcgaatacacttccagctcaagaatctgttgtctcctccaccgttcgtcccctactcccttaccaccaaaccctaaattcatcgacggcattagcatcggactcaacacaccgagagcatgagcaccacctccaggaaacccacccgttgcagccatcatcatacccgtcgtactattcatcatctccttaatcatgggcgatacacaattcttaaccgtctcttcaatcaacactccaagattcctcccatcaccaaaatcacaaccaacagccacattctcgttaagattaaccgcattcggtatcaccccgtcacacggagcaagaacaggcttatcctcgtcgatcttcccgatcctagaccgtgatcgttttctacttatcgtcactttcttctctaaaccattctccgaatcaacatcgacattcgcattaccgataacagagacattaaaacccgagctaccattcgcgttatttacatgattagtttcttctaaatccatcacattattatcttcaaaaccaataattttcccagtttgattccaaatcttcctagagatatcaaaagtagcttgatcatgaggacttttaaagaacacttctttaccagaactaaacttactcataacattcctatacttcttcttcaacctccttagcttctccacaagctgattcttattaaactctaactgtagcttagatttaatctgttcataaaacggcgccgtatcaggcggatgagagctgttaccacggtggtttgtgatgtaatcgagaaagccacggagaagctcgatctcgtcttcgtcagtccatagtctctggaataaacgtcgtgaatcatcaatcggtggtctctgatgaacgatttcagtcatacggtgccatttctgatcggaatctgatggaattgaagctacaggtacggcggatccagcgggaagagcgacggttacggttcctgaggatgatttcgtcgccggagctctggaaatcattgacggagaattcagatcttcgtattctggatcgggatcgggatcgtgatcgtcgtcttcggcttcgtttggttcgggtataacaacatcttcgtcggattcagtttctcctcctcctcttccgccaccgccaccgccgccgtcttcttctagatctggtgattcagcggagaaatcagtgtcacgttgatccgatgccatgagaaaaacgtagcgagagagaaatttttctggtagatcgaatcagatccagaaagaaggaattgggttcacgaggattgatacgggtttgttttttgggtggtggtagggtatggagaatattggagatgagtaggggtagtttcgggattttaagagttgtaattatgactaagggtgttgcggttgcaggcaagtggtccagtgtttgtttcttttacccgtgctttgtttgggttgttgcggttttagttgaagcgtgatcatgtgtttaaagtcaatggtctaccgcaaccgcggcgaaacagaaaagcgttcgacaaacttgattttgttattctgtgtactgttgcgtttcttcaacgtcccatattaacgggtgttgtgattggtgactgttgtttatgacggttaagaatgtttttagagattatagaaaaagcgattagagaaaatgcgatgacataacaatgaaaaaaggtggttactttaaattgaaaaaaattgttataaggaaggaatataagagattagataacatataaaattacttttactattaataatctcttaatagaacaatacaaataaagttatattgaaaaaactaatacagtatcaaaacaattggtaaactcacagatttttcatgtggcttacaatcggcttgttttaatttttaaccgctcacttcatttgttgtaacacccaatggctatttttaggtatgactggtttaaacgcagtggatattgtatgacttgcgagagtttgtaaaacggacggttgtgattttaaacattatgaaatatttttcaatgatatggttagcttttgaaaattggtgcatttacagaaattttatgaatgattaaccagccggtttgaacgaaattaaaccaaataaatataattaataattatagaaagtataattacaccaaatattttttattataataataaaatgtaacataatttaaatataattaataattaaaatcatatataacattctacataattattcaaaataaataaatttcatagttaaatgttattactccatgcatttagttcatgaaaaaaatatctttatactaatataaggaaagtacctttagaaaattcacattgccttttctaaagtattactaaccaatgccattagaagtataatttcaaagtccaaattaattcacctcattaagaataaacaagtcaaattacataagatctatttgtttttctcgcgggttagagatcttatacatatgttatgttagaaccattacttgaccaaaatcaagaaactctttacttgatcaaaatcgctggttacaaatcttatatatactgctttttcaagaaactcggctctctaaatccttattgctttgaagtacgctttaaccaacttcctcattatgcattgaaatttggcttggtgttgtggtaaatctgactctcaatctatgaatttctatagctatgctttaaactcgattttgaatctctatagctttgaagtggtggaaaagaaccaaaagtatgcttttctttttatcgctctcttgattttgtttcagggttttttattatgttacacatgctttatatatatatatatatatatgtttggtgttaatggcttctcattcttgactatgcaagttagtaaatttctccttatgtcgctaaattttctatttctctaggtttagatttagaattatagttttggtgatgactactaaacaaatttggtgcttcataataggtaattatctcagctctacgtcttctcgatgaggttttgcaccaacaaatcgataattgttggactattgggctctctaaccaattcacatgagtaggaagaactttgggatatattgttaataatgaatccttatgaatctagtacctattcaatggagttaacaaggaccactttactccaaaaggagccatagataacctccttagcgcgaaatcattttggttaatgaaaggactattctggagagactttgttctctaccttacaaacttggtgttgcaaatgaagttgtagagttatattaatgtatagttattgcttttatttggagtgttttagaaatgaattcatatttgttttttaattttgctaactagatcaatgcatcaagattcaaagtagttgatcttattgttcatagagtagaagactatgaaaatcttaccaactttaacaaagatttatttcgctgtcttaatcgaacgcatgtggctttgttgttccagtcttttagtcctttggaaatattggaataacgaagagtagaagattacattaagatggttatggatttctaatttatatctcactttgttgagataaaagggttacattatacgcccaaaaaccttaagttgaagttcaagcatgtaaattttgttgatcagatgctgcacaatagttacgttgaggccataacattgtaaaatgttagctcactaggcaagtagttgtttttttctcttttggaatctgatggcttcttttaatggttctaaaaaatggtgattttaacaaatggatcttatcatttatcttgctgtatttaacaaattgatgcggatttgattttcttattttcaattaccttttaaatttctgatttcttgataattattaattggttaatattagtaaaaatgatgttccttaaaaatttgttctttaatgtctttgattaaattgtaaattaaaaattgaattagatttttcttttttctttttttttttgttgttctaagattttgtcaatgattttgttagaaaaaatagtttaaccattgatttaattgtcttgctctttattttatactagattttaacccgcggtataccgcggagacaatttattttttaaattagtatatataaaagtttgcaaattaaatctatttatttttattttatagtttacaattgttattaagtaacgtcctgccaaacccgtctcgccaaatccatcccataaaaaaaaccgcggtacaccgctaatttaaatatataattaaaataaatattttacgggattgcaattgtattttggtttgtcaaacaaatatttgttttaaatagttgccaaaatctagttcaaattttggagaaaaaagatttattggatagataaagaatgtatttaggtgtgttttgctcattttaagggattgcaattatatttttgtttgtcaaacattttttgttttaaatagttgctgaatactgtgtgcgtgacatatgagattggaatatttttagtttgttaattaatttattgctggaaaaaaatcaataattaaaaggtaatggcagccattgtaaataaatctcaactccaggatttatttcacaaaatgactgcaaaaatgtatatatagatttataatttgattagagataaaatagttatttgattttacctttctataattgttaatcatattttagattcatagttagctcaaaactctgaacttttgagcatatttaaggaccaatcaagcaagagcaccttttgtatatgcttgataaaattaaaaacaacggtcgacgatttgaagatcagagaaaaaagatgatctcgatttaatcaaggtaagataacttccaaaattaacgtaatcaaaacaaacgaccatgattgaaaaactggccaaaagccaacagctacgattttattagatgatagggtccaaaactcacagaaaccgggttttgtgacctccacatttgtcaaataatataattcaaatgaggtttgataccctagaacgtttataaatttgattataaaaatttatcatttgcccatatgttggcaattgcattacgacattaactcaattgtaacaattattgtaattaaataatcaacgtaattaacatttttataatttcatatgcaaaataatctaatataaaatattttttaacaaatctatatatacatttttcagccattttagcaaataaatcctcaagttgaaacttatttacaaagaataccattaccatcaattattattaattaattaatattcctaatttgtagcatttccttatctaatatattttcatcaattttaattacataaaaatgaaaaattttaggacattattaatatatacttgattaaaagataaatattatagttaattaaacatttaaaatatttaacggaaaaacgttttataatatttataagatgtgaaatttataaaaattaaataatcatttgaaataaaacttttaaattgatgtgaattataaatcttttaataaaaatattattcaaacaaaaaataaaaaaaataatgtttaattttacagaacaggattagatgataagacgggtttagaatatttataatatatgaactttaaaacaattaaataaccatttgaaataaaaataatattacaatacttaggttatatcttgtcatttttgagtttggattgacgtcatgattttgatagataaaaaaaaagttataagaattatctttattatatatagggtttgagaatattcttttaactttttaaaaatgtttacgtatttgttgaaatatatagggtttgataaaaaaaaaaatttaccaatcgctattgcctgcaaccgcaaacgcttgcgggaataagcatttagaattgggtgatttcgaacagactatagagatccggagcagtttaaagtgttttttatgattagtttaaactctagcaaccgcaaacgcaacgtttaatgatggtagcgagagaacccaatcaacccttagtggtcttatatcctctctcggcccgtgaacccatcaaaaccggggtgttacattcgtttctcgtttaattggtagccaaatgaacagttttactttcaaccactttctttaagcctttggttcaacaaatgtttaatagaaaaacaattcgatttattagtgaagaacttggccttgtacagaaaatagaaaataaagattttgacagagaagaaagtatttaccagttcaattcaaatgaagaaaagaaattacaaatcgtgtcaacaagaaccgaaattgattttttttttcgtttccttctgtttttaaaatgaacaatttgaaacagagatttatttaagttaaagcaagtgcagttcttcttctactacttctaattaccatcatgaaggagaagaagaagaagaatgtggtaatggagaagtgctttagtataaacggaacttctcctttgtgttctggaaaacttgctccgcaatcgcagcgccattcccgtctgctttcttgatctccagactagatttctggtaaacccccgtgcctctcaaagcatcagctatgaagtcatcaaacccgatggctatagctgcttcggctttggctccataaaccaacctctgtttacaagtagagacatgagtactcattgtgataaatgaaatgattagaaagatgggtttgtgagtagacttgtttcgacatcttaccttgagtctcgagagatggatggctccgaagcacatcggacatggctcacaagatgcgtaaatctcgcattctgataactcgattttgttaagtttcttacatgcctgcacattcacaatggattcaaatcatcatcagaaaaccggtttttgcaacgtttcaagagattcaagcgtaatactcttttcttacctctctaatggcagtgacttcagcatgtgcagttgggtcagtatatttcaaaaccatattgtggcagctagcgacaacctcgttattatgcacaatcaccgcaccaaatgggccaccatcaccacagtccactcccttgtaagcttcttcaacagcttgcgttaggaatttatggtcgctatcgtgaacagctgatcaaagacaaagtatagaaacataaaccacaacaacttctgcaaacacatacaatcttcaactaagaatggtggacacataaatcaaaaatagcaagagcaaaattacaaagccaaaggtataagcatcacagtgatcataagtcatcactataagtcataaggtctattaccttgttggtgaccggaaaatgcagaagctacggagatggtaccatcttttgcttccactacacagttcaataacaaagcaaatcagatcctctaaacacgaaacatcaaagactaaatcgacacagacaatgatcaaaaccaagaacaattacatccattgaacaacaaagcttcatggttactcagatcacaagttagtagacacaagaaacagataccataacttgtggtacaagtaaacatcagctaatagaggaatcttcaagctaagataattagataacacaaaactagaagccattgtttctaatcaaaaagtcaaaatcacctaaaaatcgaacacaaatctatatgcttatgtacattccgatgatatataacactctggtgatctggtgattgacaacgagtaaacattcaccagaaattttctcatctgcatgtgaaattagaatgaagaaataagtctagaatccagatctggaaactgaacattgaatcagcttgagaaagagtctgattcgaaatagaatcatccaaaatcgcgaagatcgattcggttgtataatcaaaccgatgcaagcaaaaacaacgaatctcgagtagaaattgcaaaatctaaggagattaaatactccgatctcgatcgagaaactaacaaaaatgcgacgaggatcgtaattgattttacctttagcttcttccatgagtatgaacttgaaggaggatttctggagaaatcgaagaaggtaggtggttttgtgtggtgtgtgtggagattgaagaagaagagaagtgtttatataaacaaaagcagacgagtccaaaattgagatttgggagagagataaagacgaacacagaaggctgaggtgtgagggagataaagagagagatagattaattgtggaaagtgaatttgtgaggaaggaaccaagaaaattgggtttattactcaaaaggtgtgatttgacatgaaaaagagctagcttcatgaggatttttttcactaatttaaacatttttgttaactcatgttttcttaattaaatatgctgaatttcaaagtaatttagtagtttgagaattctgtattatgagaaatgtgaattatcaaaatttaatttatgatgcatagttcaacgtttatgtgcggttgtgattactggcaattttcacattaatcacaaaaaattgacaaaaaaaacattaatcgcaaaaattagtttctagcgtttgaaactgtttaaaattaaaaaatggttaaaaaaagtttctaataaaaattttattgtacaatatttaaaaattacaataattaattgttttctcttattatatattgttacatggaattctatatattaattgatatatatatatatatatatattaaacgatttaacagattggtttagtcataaaaaaaataattgtatataaataaatcctctaaagttctgaaaaacaatattctaaattagttattgcatgagttcttgaaaattagataacttgaactcaaatgagcaagaaaccactatcaatagtaacgatgaggactatcaatctaatcttttgtggattgcgaatgggatttaattttatgaaaggcagtcatagtcgaatttttttacttagactatgtataatagaaatgttgaataaattatttaactgttaaacttttagaccatatataatagggatgtcgaatttttttatgttggtatgattgtatagttattatataaaaaaatgaacaaaaagatacataaacatggcacaataatagaatcggataagtgataagtcaaatgactctaactcataacacaaatgggatcaggagcacgttagcatttggtagataagactcatcttccacgaaaacgtgccaaaaaatgtgcaataaaggcttataaatagttatatatggaaaataagaatcatctcttaaattgtagtcttttactcttcttagtcattacaaatggagttagtttgatcgtttaatctgtttataaaatttctttctgaatttcaactatcttttttgggttgacacatataaataaaagttaaaccatataagcaaaccaagattctttttcttcttttctgtttaaatatttggttggccaaaagactcctagtgctaataagaatgattagagtacctctcacaaaaattctaaaaatgacaacaataaaatgcaaaaagtgtatgagaaaagaacaaatattttaaataggcgaatacatgcatgtatgagaatatataactattttcatttatgcgaaataattattgaacgagagagacgcacgttaccggtgtgagttggttataaataaaataaaccaaaaaaataaaaattgaatcaaatggcccattattgttgacccatcaattatctttctttatcaatgaaagttaagaatactttagaaattgtttatacgttacagttgctattggtattaaaaaaaaaaaaacacgttacaatggagggtggtaactagtctggagactgtatgcatgtaatccttaaaagtgttgtcacctttcgtagaaatttacaagatggttcgttaaacaaataaaagagcatggttgttttagtgattcaagataagacaataaaatagagatcacactattcataaatgttcgcgtgtacggcttccactcttacccgaatcttccctcttgcatgttgcctctcctttctttaaagaaagcacgaattatcaatgatcaaaagagtgtgtggattaagatttaggattgagtttaaccatctacaaaaatcgttgtggttctatttgatttactattagacgtttaaaaaaaaagattacttgcttttctacatgtcttcagaactagtcttggttttgctataagattttacccgatgataatataaaattaaatacgaatgcacttgttttaccaaaaatcagatcacatttctaaaaaatgttaccaagtgtgtaacaaactatattttaatctgtggtacaccgcggggctatatctttttttaaaaataaaaatttaatttgtttagtagatttaaaatatatatgatttaattttctgtattttctaaatgtacaactcttatatctacatattatttagtgtacaattactatgtttaaattttactgtttaaaaatatagaaagaataacacatagtttattaagttaaaatctagactataactaaataattcaaattttaattatatttgttttattaatattatttttttgtttagtgtttaagataatataattgtattttgatttttatatctaggattttacctatggtataccatctcgtattactatcgatccaaacccgtcatatcatctaataccgttcagtgaaattaaacatatctaatggattttacccatagtatagcgtcttgtattttatatacccaaatctgtcttaccatttaaccccgttcgatgaaatttaaaatattttgttatttttattttaataatactttatttgaaaagatatataatttaaatcaattttttttacttcaaatggttatttaattgtttaaaagttcatatattataaatattataaattcatcctaccatctaatcccgttcggtgaaattaaatatattttcttttgttttttgtttaaataatacttttcttaaaagatttataattcaacttaatttaaaagtttttttcaaatgattatttaattttatagatttcatatattataaatattctaaacgtttatttcgttaaatattataaaagtttaattaactacaatattttatcttttaatcaagtatatattaataatgtcttaaaatttctctttttttaagtaattagaattaatgaagatatattatataagaaaatgctactaattagaatcattaattaattgaaaataattaatgtcaatggcattccttataaataattcaaacttgaggatttatttcataaaatagctgcaaaaatgtatatataaatattttatttaccacatattccaagtgaaaactaggaaggattcgaaaaattattcagtaaataattcctacctttttgcaaaaataacggatatatcaacatcgtcaataagttggtccaattatcgtgtttttatttttatttttatttttatataacatagatcttgcataacactacaataagttatttttatccgatgacattttattttacattataccaccttatttatgtaaatcatagaaagtaagttcagtagttacttacggctttacaacaagttctataaccaatttaaaattttgacccaacaaaataaaataaaaaaccagttacaaaaaaaattgattatgtaacaaataaacccaagaaaaaagaaatagtatatagcggaaattatcttgtaatttaagcatttaactgttccctacagaaattaggaaagtaatattgagtaactctcaattatgaaagagagttgtatctttttctgtcaaactataatctttattggttaaaagtctttatgtatttaacacataacaaattttcagttgaaaattatataatagaaataagaatccgattaaagaaagcaatgatcattctaagtattttattccattatgtcggcgaaagatctcataaaggagatacaccaatctatatcagaatgaaaagcagacaaatgacaagccatttaagccacttttaaatattaggttacaacaaaaactcaaacaaaaaaaagtaagggtaaaatagacaattccaaagccgatccgagccgtgattgaaactgacccggataaagacgtgcagatcctgcaagataaaaatggacctcgattcttaaattatttgtcgatttaatgaatcctggtccaaagtgataaaaggttttaaactctctcaggcacagttaccaatatcgtaaaagaagttactaacttttgaaaaaacagatcttacccactttttactactaaaagaagaaagtttacaaatttggtcaacgcttttcaatctttccggtgaactcttggtcgccggaggacatccgtggtgctcccaggtgagtctggcgtaggaggtgcccctcactctgtggtctccttgctttctatcttgaggtcaagagaacaacttctttattcagccctctagttccagacatcctcaacgctcctgtactacatttccaatggtgtatgctcatgctaggcgcccacctgtagcagtaatacttggtctggtaacttcctgcttactctcttgatacttctctctccctgaactatctcacttttgtgaagaactatcctttttttgagaacattgtagtgaaactttcagcctccgggcaagaactatctcaccttgtgtgaagaaccttttggaacgcttgtttacctctagtgaagcctttctccaactcctacgactcaaagaatggagagaagaatcccatactacctgaaaaggaaagaaaaaaagaatgagttctctccactccctcgaaagagaataagagcaccaaccttggataatgctgaccttatcagggagaactctctcatactcatgggaaggctcacaaacccagagatccaaagactctggtccctcatctctttcctctcaaaccgttggaacttgagagacaaagcaacaggttctgacctaggcagaggatgctttcaattccgctttgactatgaggaagatctacagaaagtcttggataatagaccgtatcatttcgaccagtggatggtgattcttcagcgttgggaacctgttatctctgcttctttcccctctcagatcccattctggatagagctccagggactacctatgcatttctggaaaccttatatgcttctgtcaattggatccgagataggggaagtcgtggaccacgaaataacaccagctgcagcaaagataaaggtcattattgacggtctcaaaccaataataaaggagacaatggtagattttgatgacgacagtgagatattagtaactttggagtataaaaatctcaagaatcatcgcctacactgcttaagattgtcccatgagaaaaaggactgtccggggcttcaatcctcaaaagtttctccaaaaaagagcctccctcctcctcctaaagctgcgagcaaagctaaatctcaaccctcttacacaccaagagattactctagaaaatcagtggcggggaaaagtcactactctgatcacatcacttatgaaagaagagataccagcagaaggggaaatgatgatggacgttacagaacacaaccatcttctgggacaaggcggtatgagccaaaagatctaccttatagaagatcacccccagatcctatgcatccaccagagaagaggctcacaagtaccctgctagatattctcacagtgactccagacaaaacttgcaatggagagaaaaaagcaaatcaagagacagccatagaattgaaaactcagattcatcaagcacaaggctctgacatctagagagaaacacaaaagcagaggttacccccccccccccccccctccaccttttgccagttcctactactgaagaagttatggggggaactgcgagaggttacacttcaatataccagttgtgctgatccaacagagagcgcaacacgaaaacgcagggttgtttaaagagaagcgagagatcttatggctgagactgcagctcaaatgatagaggcggtcacaaaagcaaaccaagactacttgagagcctctgttgatcaagttcagaccaaaactggagagcattcagatctcccaattcacccagcagagctccctacatcctcaaatgtgccagcaaaaaagaaacgagctcgccctcctttgaacagagctcaaaatagaagccctctgacgctcactggtgtaaaatcaagtaaaagaaacaaatgtgtgattcaaaactcacaaagaagaagaacttcctctgcgtcaactgcccctcaatgtgcagagaagaacaataatagcagaaaaccacctgttaaaaagaagttgacgttacagggagatgcaaataatccctccacaagtaatgcagcccctaaaggaacattaatacctgcaatgataaagccgaagatggattttcacaatccatcaaatcctcttccttaaaggctttgagctgaaactgttgtgggttggggaatcccataacagactggcgactgcgtgagattcattctgacatctcacatgatcttctattcctcatggagacgagaaatgtggatgacatggtaatcaaaactcagggatggatgcagtgtccttctcacttccttatctctcctcatagcccaggcggagaaggtctggctttattctggaaacaagaggtggaagttgagataatatcttcctgccacaattttatagatacacgcattaaagctgcaggcaaacacttctttgcaacatttgtatatagggaaccagatagagtaaaaaggaaattggtttggaatctactaacagcccaaggtacaaacagagaagatccatggttcctcactggtgattttaatgatataattgatgctacaaagaaacaaggaggaccagaaagacacgaaggtacctttgtggatataagaagcttcatggctgaatgtgatctctatgatttacgccattcaaggaattttctttcatggcgaggaaagagatatgagcacgttgtccactgtaggttggatagagcaatgtccaatggtgcttgggctgaagcttatccagcaagcacatgtgtatacctttgcttcgaaggatctgatcatagaccgcttcttaccgattttgatatgtcaaaaaagaaaaagaaaggcattttcagatatgatcgacgccttaaagaaagtgaagaagtgagtcacctaatagaagaagcttggaattatgataatcaggaagatgtggaggaaaagatcaatagatgccgtagagatatcatcatttggacaagagagaagcaccaaaatagtcaaaagctgataaaggaatataaacaaaaactggaggaagcaatgacaagtcaagaaccaaacttacagctcatctcatcaattaacaacaatctactcttggcttataaggctgaagaagcgttctggaaacaaagaagtagacaaatatggttagcattgggagacaaaaattcgggctattttcatgctataacaagaggaagaacagtgataaacaagttttctgtgatagaagatagcgagggagtaccttcttttgaggaggaggggattctgaaagtgatcactgaatactttgacttgttattcacatcacaagacggggaaagagcaaccacagtccacgaagctattaggccctgtatctcccctgcaaccaaccagaccctaatcagtatgccaagtgaagaagaaataaaaaaggcttgctttgacattcacgcagataaggcacctggaccagacggattctcagcgagcttctttgaatcaaactgggctactgtgggtcaaaatatcatcttggaggtccaatctttctttgcttcaagtattttgcctgcaaacattaatctaacacatatcagacttatcccaaagattgcaagccctcagaaaatggtggattacagacctattgcattgtgtactgtgttctacaagatcatatcaaagctactatcaaaaagactacaaccggttcttcaagatatagtgtctgagaatcaatcagcatttgtgccaaagagagcgatcacaaacaatgttttgataacacatgaggtactacactatctgaaaacatcaggggcaaaaagaagatgttttatggcagtaaaaacggatatgagcaaagcttatgatcgaatcgaatgggatttcatcaagcatgtaatggaaaagatggggtttcatccaaaatgggttgaatggattatgtaatgcatcacctcgatttcctactctttcttactaaatggtgcagcccaaggatcagtcaaaccacaaagaggcataagacaaggggacccactgtcgccctatatctttatcttatgcaatgaggttttctctagtttatgtcagaaggcacaacagaatggggacttacttggagtcagagtggctaaaggcagtcctagagtgaatcatttgctatttgcagatgacaccatgttcttctgcagatctgaccttcaaagctgcaagaatcttcttctaatctgcaagaatcttcttctaatcctgcaaaagtatgagaaggcctcaggacaaatgattaacaaaaacaagtctgccataaccttctcaaccaagacaccagaaatgattaaagccgaagctatgcaagttttaggtatacaaacagctggaggtttgggaaaagaccttggcttacccgagctctttggcagaaagaagaaggacatgtttaacttgatcatcgaccgcatcagtcagagagccaaaagctggtcctctagatttctgtccactgctgggaaagcaaccatgttaaaattggttctagctgccatgccaacatatacaatgtcatgtttcaaactcccaggctctctctgcaaacggatccaatcagctctcaccagattttggtgggactcatcattaggaaaccagaaaatgagttggatagcatggtccaaactaactaaatcaaaaagagatggtggaatgggtttcagagatatacctaactttaatgacgttcttttggcgaaagtgagttggcaaatactcactaaaccatcgtgcatgcttgtaaagatcctcctgggcaaatactgccacacaacatccttcttagactacaaagtctccaactatgcttcacatggatggcgtggcatttgcattgaaagagacctgttaaagacgcagcttggcagaactattggtacaggctctgatactctgatctggcaagaaccgtggatctccctcactcaaccagtcactccaatggggccagcacctcaaaactctcagtacttatcagtggcaaatctcatttgtccaatctccaatacctggttgaaagagaaaatcagagtgctgttacctgcttatgaacaagagatcctagaaataagaccaagtcagagaggggcaaaaagacagatacctctggctgcttaccaagtccggcgagtacactgccaagtcaggctatcatgctgcatctcaaacggaggcgattacgatttcaagccctcctctcgatgatttcgcctggaccaaagagatctaaaatatcaaaacatctccaaaaatcaaatttttcctttggaaatctatgaagcaagctctccctacggggaaaaacctgagacttcgaggaattgtatctacagttgtatgcacacattgtggagaagaagaatctgatactcacctcttcttccattgtagttatgcacgctcaatttgggaacaagcccctttcaaacatcctattgacccgtccagaattatcactctgaggaaaggtattgaatcttcaaagcttctgatcaatttgccacccacaggacttggaggaggaccactcttcccgtggatcatgtggacgatttggacgtgccgcaacaaacgaatctttgaacagaagcagatcggaccctcagatgcgatctctcaggcagtctctcaagcccgagaatggctagcggcacagatcttgataaatcaacctccacatccccgaattccatatccaattgacgagattgaggttgatacaattcgcgtttatacggatgtagcttggagagccgagacgaaggaggcgggctttggatggatctacaaggatttctcctgtaactcagagagacaaggcaaatcttcttcctctaacgttcgatctccattaatggcagaggcgatgacggttttccttgcgatccagcaggccatcgtccttggttataagaaaatttcacttgcttcagattcgcaacagctgatcaaagcactaaatttggagtctcaatctaaggagctctatgggattcttcacgacatcctttctttatcttcagtttttgagtttatcaaatttttctttgtttctagagatatcaatcgacgagcatatgaagtagcaaagtctgctttaaattcagcttttaatgtaccagctgttgtaccggtttcaatttcactgtaatgaaaaccagcttttagacaaaaaaaataataaaaatggatccttgtccaatttgcattccaactaagtgattcagcgtctccaggttcgttcgattctcactcatctccttcaatctccaattctctagtttcaaaattttgacgaattgaaattgaattactctcttttgttttgaaattgaaggaatattgggcttccgtggatgtgccgttatgcaaccaagtaacactgaggtcggagctcgcaccatgaatccttgtacctttttgagggttcttggtcctgaaccatgaaatgttgcttatgttgagccaagcatacgtccagacgattctcgctatggagaaaatcccaataggcttcaaagacacactcaatttcaagtcatattgaaacctaaccttggaaactctcaacaactctttatcaacagtctttctgctttaggtactcatttgaaaatgccttctcttttgtttccacttatatgtgtttaaacactcaattgcaaccaggataggttcctttccttgtatatgtacaattgattgaagttttctccatgtgctggttctggtttgtggttttatagagttaattttgatttcctcaaggtttgattatgtgaaggtcgtcttttatggtgcatttggaaattttctcaaccggataatccttcccttactattcttaagcggtcttataggtattgatgtgattgcgcatgatatacggtttgtagaagacaactaggagagctcggtaatgtgtgaaccatgttttttttgggttttccatctcttttagtttctcactatattctcaggtgcttggtcagttgttaatatatactagctatctgatcatttgaatgatttacaggtgcttgggggttgggcgagaagattttggatggatggtatggaaatcacacaatttacttactttcagcacgtaattttcattttatgtaaacatttctagaaattaactatagattaaggtttgcctttttggtttcttagggtagatattatattttgttctgtagtatattttctgctttggttgttaaaagacaatataattgggaagtttacttctttctaggctggaagtcttccattgtctccagttgaaataacctatgggcttgaacgcatcatcatgttgcttcaagtcattcctatactcccttattgttcatgtacacattttccgttataggttcgttttgtttgggataagttagcctttcgttttaattgacaggaagttgaccatttcaaaaagatcttaaatgctgatggaatcacctacagaagtttttaattgaaaccttataacacacacaaaaaaaaaaattgagtttcaaattaaaaataaaattagtagaattacttaagttcttcattataaataaaattaactatatgtaatcaaaatattaaatctaacacttgacaaacaaatattataatatatagtactatctaaaatcaaatataaaattcatccattaaataaatgcacattcaaaaaaaatataatcaaatactacaatcaataaatctaacagttcaaatgtttgctataatatttaacaacgcacatatattataataaaatcgtataaaaaaattgacaaaaccaaaatattaacaaaccaaaaaaatttactcgataatacaattaaaatttcatggtataatatctttcaaaaatctaaagttttgtatttatttatcaaaacttaacacccgagcgaagcacgggttatcaatctagttatagtttaaaagccaagaaattttttatcagtaggttaaaagccaaagacaaacaagttagtttccgaattcttaaagagtagaaaacataaatggtgtttttaatttcaacctatttcaaaaccacgtgaaagcatagcacttgctctttagagttggattttaatttctttgacccttttttgttgaatcaattgaaagagataattacattatggagtactttagacgaaagtttttacaatttaggcactttgcaagaagtagacattttctcatctttttaatagaaaattagacatttatacccttaactgaactaagagaaacataacgtcaattctcttctctctctctctctctctctctctctctctctctctctctctctctctctctctctctctctctctctctctttatctctcttccttaacaatccctatagcccgttcaaatctcccattaacgtcatcagtggtttgattctctgtttgattcatgtggtttgcgtcatcagtgagaacaacagcaacgtcatcggtaagagcaacaatggagattcgtaaaattgaaaaagaacacatgaagattattttgctctgatttgtctatctgttgatttcgatttctctttcatagaagttgagtgagagcaacaatggagattcgtaaaattgaagaagaacacatgaagatgttaacggaatcaatgaacccatgaagatgttaatggaaaaaggctgaaattaatcgaacgaattgattacttccatggattttgttaagacggaacagaccatttattgttgtctacgaagttctttccattcaattatttaagaactacactaaactgtagatgtaaaatcaaaatctttaaccataccctaaacttttcatatcatcaattaaaagtacatagtccatttttctttggccaatacacttgtgtatggtttagatttatacttgtgtatggtgttaaatatacttgtgtttggtttagatttaaaagtaaaagtgcttcgacagcgtgagcagtcctaaattcttaagatgatggcactgcttcttggtttataacaccaactccaggggaagcagtgagtcctgcttcgaggactgtaccaacgtctaggggaggaggacatcctaagtggtccttaaagcccattccaggtgaagcaaaccctccatattggttctcagtaaaatcattgcctactaggttggcatcaacatcatcacgggtttttctctcactttctaggtacaacataaccgatgtgccaatatcctcttctccagcagcaagtactggcctcacaacattaggtgtgctttcagctccttcggcatgtgccatatctaaacccgatgggctgaaatcgattggatactctctatcaaaagctagagtccaaatatcttcatcagagatatccacatctgaaccactacgacccaccccattagtgtaagaatcatcactagcattcttgacaatatcatccacacactctttacatttgctttttcccttagacatacgaacataattctcacggttctcaactgctttaacctctcttaagaaatcatcatcctcatcagatagaacttgttgcacaaactcacactacaagaaaaatccacattcttatcaccagagaaacgctatgttacgtcattaatagcgatttcataaacgctattttatgcccctgttatcgtaagtaccccatataagataacgtcatgtatgctatgttaaacaattctattatagcattatgaaaacgttgtgtcttgatgcgtattaatttgttattatattatgtaataattcattacccatgctatgttaggggactctacgatagctttgttaaaccggtttagtttatgtttttatatagtaatatttatgctatgatatagtatcttatagcgtttgtctatttttaaaattttgattaattactaacttattgcgctacagtagatggatctaatatagcatttgttaaatcttacattttgataaccaatttatttcgtagcaggtttttaaatgccataacaagtattttcatgacacatgttttataaaattccacgacattgcattaatactttcaaatccaaaacaccaatcacaaaacaagtcaagtctcagataacaagtttcacaaaacacaataatctcattaagatccaaaagcaactaagagtctgaaaacaagtttaactaacaagttccacaaaccaaacctcatgccatgatcactttgtcctcaggccaagcaataactgtcctaagggcatcttccataatctctatttcatctgatttcttccaaacttctgcatcgctaactttgacaatgtctacccacactttaactgcattagaaccgaaaagaacaaagtgaaccttctggttttggatcatttgttgcccatcgtccttcagcaactacttgattcttgtctataatgtctatcaacgtgcacttcttattttcctttaaaccattttgcatgatacgctgccatgttacaacataaaacaaaagtcagaagatttgacagaaataagcagaccaaaataaaatagagtatttacctgtgatttccggataggagactgtgaatatggtataaaattcttaactgtagagcttggtcgtgttgcagtctccataagtgattcagaacctgatcgtgaggatttagaggcacttgtctctgcagattttgttccaacagcagttttagatcctgatgttatatttggtgatgcagaatgctgtctagcagatggaatctcaaatctaactttattaacaggccatgaaacaaaagccatcaaacagtcttcaaggtaggtcatatccattgtaggcctctatatgaatgtttctggttaaagcactgaatccacaaatacctttactgcctttggtccaataggtagtccattaaccaatgcagtttcttcttgtgtctgccaacgaccctcagcaacaatcacatcatcattagacaaatccaacaatttacatttattcggagagtttgctcgtaggccctgtcacaaacatttagaaaacaactcctcaaataccaactcattaataggctgagtacaacgaagcaacaataagaaatttaccaaaggcgcaatgtcttctatttggatttccttgtccaaaggaacaccactattctgactttgtctttgaaatgagcatgtgtgaaaacgttgtccattcactatataaccagtataggaccttgcactgcaccgtggaccatatgcaagccatttaattgtttcttcatgttcagatgaagaaacaggtatctagcaagatgcatatatcagagtcagtcacttaattataataagaagaatcagacaagttatacaaattacagagaaatagcttgccttttcttttaaccaagatgcatagttcttggcatgcatagaccataacgttgatgcatcacgtctacaccttggattagtgtcttgtagatgttccaagtgcatgtttgcaaaacaggattaaaagaaactatagtcagattgctaaactgacattgtaattgacacaataagaattgttaacataaacagaacttactcaacaaaagtatccaaggcagccatattttgaatgactgcaagatgggctatgttctttttcatctcagtaagagtaatggcagttccagcagataaaggacgatcttctagtatagaactgttctcatattctgtatttatgtcttctttttcttctaccattgttgtcttcttcaagaaatcactacagaactgcacacattcttcaacaagatatgactctacaatacaaccttctggtcttgctggatttcttacaaagtcttttagaactttcatgtacctacaaagtccaaagaaaaagatatcataatgcagaaaaatttgaaacgtattcacaagagttcaaataatgtttacctttcaaatggatacatccatctaaaatggactggtcctccaagtcttgcttctcttcctagatgtattgtcaaatgtaccatgatatcaaagaagctgggaggaaaaaaccgttcaaacatacacaatgtttccacaacttcacgttccattactgagataatctctctgtcaatgactctctggcacaaatggttgaagaatgcacataagcggaatattgttgtcctaggacctttaggtaatagccctctaagtgcaataggaagaagttactgcatcaacacgtggaagtcgtgagacttgattcctatgatcttaaaatcctctagacaccccttgatatattagaacaatatccatatggtcctgtaaattcaaataatcttttgcagaatgtttttttctctttctttgacaaagaccaaggtgttgcaggtagatatgttctctttccttgtgtatttggatgcaaatcgttccttataccaagatgctggagatctctacgagcattaagaccatctttagattttccacaatgcaacaatgtagaaacaatgcttgaagcaacatttttctcacaatgcattacatctagattatgccttacagggagatcctacaacaaataaaagtatagttagattggattggatccatacttaatcacagcttaattgatcaattatgcaagcatacctcccaataagacagcttgaataattttgatcgtttcttccactttgataattcctcctggtctacttctgcttcttcatcttcctcggattcactagacgaatcggaactctcagaaactggatcaatataggcagtcctttttctctttctcccagaacctttaacatttccaaaatcgtttctgtagtttttcaggttttgatagacttcatgaccagttaaaattcttccctttttcccatgttcagccttcccatcaaaccatgttttcttatgtctatatctatgtgttggtgccaatccctttctatggcacatatacacatgcttcctgctatacttcaaccacatagaatctgtattttttccacatataggacaacccattttctctctaactttgcagccagcaagattactataagcgggaaaatcactaattgtccagagaagcattacctttagagtaaatgtagatttactataagcatcctaagttacctctcccttcttccatagatgatttaaatcctcaataaggggttttaaatagacatcaatgctattaccaggttgttgtggaccaggaataagcaaagttagcattatgttctccttcttcatacataggtgaggaggcaagttatagtttactataagaactggccagcaactgtacttagtattcttcatgttgaatggattgaagccatctgttgacagaccaagccgcatgttcctttcttctgatgcaaataaagggtatttgtcattcatcttttcacatgtaacagaatctacaggatgacgaagtttgccattaatagacttgttactaaaatgccatcttaagtcctttgtcatttcctctattctaaacattctcttcagccgcgggattattggaaagtaccgtaatactttctgtggcacacctttcttgacctcacccgtctgcatattaatcttccaccttgaagaattgcatttgggacaattttccagcatcttgtacttctttctgaaaagacaacagtcatttacacacgcatgaatcttttgatatcccatatcaaagctcttcaaaaacttcttcacatcatacaatgatgtgtgaatcacattgtccttgggcaacattttgggcagcgtctcaagaagctcatcaaagctcttgtcagaccatccattcttggtcttaagcctaaagagagacacaattgccgatagcttgctgtggtttagacaatcatgatttaaaggggtttctgcatctgctagcttggcgaggaactcatcttttctcttgtcctcaccctctacaatctcacctaagtcagccactggattgtcacctagatcaccattagtagccaactcttggtcattgtattcagcagctttgtataactcatgaatttcctcattccaatgattgacttccctttcacattctccatcagctactgagtctccatgatggtaccgatcactttgcagcttgtaagcctcatccatccctctcgttacaagatgaccaccacatcactacttgagtggtggtacacattacgacagtctttgcttggacatattatcttatctatatctcctaaagccgcaaccacatcaaatacaaaccttcgagcacctctctcataaccaggatcagctcttcaatgaagaaataaagttgaaaaaaaaactcaagcaatgttctaaaccccaatttaaattaaacctatctatataattttattgattacctgcatagatgcacccatgacttgtccaacattatatgttataagcttaaaaaaccttattaagatgaattgaaaccataatcaacaacagtcacagtcacagagcaacaattcgagtaagagaacttatcagacaacttatcatgaagagccaacttaaactgaacacatagtggttatacgctgaaaaagccggatatccggctccgttacagggctaatccatttggttattcatttacaacatccacttttttacttttaatactccacatcatcttctctctcttccacatcattattcaacacctacacaattttcatcattacaatactttgtttaataaaattacaacaccttaccccaccattttcatttcatattttttattttatttatgtttctgtttttttgtgattacatattattaatcattgttactatcaaattaaatttaaataattaaatattaaaaaaattataaaataattttgttttaatatttgtttttatttttataaaatattttaaaaaacttttacaaataataaaaacgagaactagaaattattattattttgggtctaaaacagttttttctgtatccaaatcaaataaaaatagtctctatttatagagaatgaaaaattataaattttgatataaatttttatatttttatgtataaatattgtaaaattatataattgagatgaaacaaaaaaaataaaaatcaaagcaaccaatcaaaatataatacttgtcacacttatcttctctcttctactttcacgggtgttgatatttatcaacactaactttgccatgtctcacctagttttttattacaacacactattatagtggaaatattttttcgccagttgtaaaatggtttacaacaaaccattgttttagtcttacgagaagtcacgtcagcactctccccaaagttctaaaaatctctcttctaagtgccatgtggcataagacaaatgtcaattccacctcatctgagattgaacgcgtcctcttcttcaggaaagttctttggagttgtgttccattcaggctagagtatcaattaaacttttttttcatttgcaacaatgggaaggccaagtagtcattaatcttcatgacatgcaaattcaaaaacctttaacctatatttgtcacaaactagataacaacccgtactatatgcgagataaaactattcatgtaaattattataggtaaaattatatgatagtttttaggtaattatatatttgattattaatttagttagcaaataccataattggtgaaagaattaaaattatcaatcaattataaaatattgttagattccatattttagatatttagtcgatatgcatcttcttaaattgattacaaattttaaaatagatatttgattattcatccttttaaatatactttggatattaaattagtggggatatttcttattcgatatcatataattatcaaaagcctaacaaatgtgcacatatgtcgacattatatattttacttcatgtactgaaaataagattataccattaaaatattttcagttctagattttgttaagaattccataaatattggaatattaaaaaaaacaaaatattactaagattttacatctacaactgtttaaggatcttaacgataattcatatttcatatatatgatttagatttcaaattttgggtggacggaaaaagtattagattgtggtaaaacacatttatatatacacaaaattttgattattataaagataaagattattgaaaaatgtaactattagaaaattttgtaacataaataagattattaatttcatatgacataatggaatatgttttgacaattatttctgttaaaaataatgtcaaagtcctaatagattctataaaataagggataactgtaacatgtataaagttgtcgttacacaaaatattaggtgtttcatcttgtaaagattaataactcttaatagcatatattaaaatgtaatttttttttaattaattgattgaaaaataacatgttaagtgtcttgctatgttaagttcatttttaaaattttatttggattaattaatgagtaaaataagtgttagtagtaacaatgtcaaattgatgtaaatattctaatagaaaatggagaattaattaaatgggttgatgagctttgtaaacgcgacacgtcagcatggcattttcgttaaccacacgtaagggtaaggttattttttaaaaatgtttctctattaatatatagaggatttatacgaatacgatagttttacccttaccttgctttttatatttatacgaatgagcgtctttatatctattgatttatactatcttgaaaagactctagaattagtttgacaaagatataacacaatctgcctcttcaaatgattgtgatattttatccaatgctttccaattaatagtatagattgttttcttatatcttctttattttttaaaataaatttccatataatgtttttcctgaataaataataagtaaatttttaaccataagcggcctaaccctaagatcgcgaaagagaatcatcgtgtaaaccataactctaagaccatctccaatagttgtctctattttttcatgtaaatagagaagaaaaaatagagatctctatttttacttcaatggttcctgaaaaatagaaatctctatttgttagaaataaaaataggggaagaaatagagatctctataatagaggtaagaatagagatgggttagagtgaaatagagacaaaaatagagtttagcgacaaaatatggatgggttggagatgccctaagagaatcgggaaactactcacagtttcatgcgaaccaggaggagtcggaggatttgcgtccggaggatttgcgttcggaggatctgcgtctggatatttgttatcggaaaagaatccatttttctaatgaggaaaaaaagaatttttcgtgaagaaaaatatgtgatctttggggagtgaagaaagaagaagagagaaactaatttaaagaggaggtttgattttctctgctatgatttttttatatttttttttaccgttcgattgttatagggagtgatgatacttagacttgtcggaaatttatcacgtgtttggagattgaggttacaaatggttgtcttaagatgaatagttggaaaatattaagttggaaaaaaatgaattgaatattattcaacatgttcctctacaaaaatgtagttgaatgagttgaacatttttgctgcagaatttgttcaacttttcagtttttaaagttgaatgggttgaatcatttttcaactctttcatctcaaatggtaaaaaataagatgaatgctaattcaactcttttaacttcttcatttaggtcaactatttgcagcctaagggttaaacgatgacctttttgatcggtttatgttcagttttgctcataagcgcctaaccctaagatcgcgaaagagaatcatcgcgtaaaccataaccctaagagaatcgggaaactactcacagtttcatgcgaaccaggaggagtcggaggatttgcgtccagaggatttgcgttcggaggatctgcgtccggatatttgttatcggaaaagaatccatttttctaatgaggaaaaaaagaatttctcgtgaagaaaaatatgtgatctttggggagtgaagaaagaagaagagagaaactaatttaaagaggaggtttgattttctctgctatgatttttttatattttttttaccgttcgattgttatagggagtgatgatacttagacttgtcggaaatttatcacgtgtttggagactgaagctgcaaatggttgtcttaagatgaatagttgaaaaatattaagttgaaaaaaattgaattgaatattattcaacatgttcctctacaaaaatgtagttgaatgagttgaacatttttgctgcagaatttgttcaatttttcagtttttaaagttgaatgggttgaatcattttttaactccttcatctcaaatggtaaaaactaagatgaatgctcattcaactctttaaacttcttcatttaggtcaaccatttgcagcctaagggttaaacgatgacctttttgatcggtttatgttcagttttgcttaaataggtgataaaaaagttttttcttattattataaatggagaggtttgagttcttaacttagaccatctccattgattagagactgtgaaagtctctccaaaataatattttaatgtaatttagtttttgatttaatttttaattcatgaaaaaataaactaattgatatataacacatgacataatgaacttctcatcgtttttctcctctcttatactttttctattcttttaatattattttggtagaaatatctaattcttataaaaaagtttatataacttttcaataaacatattcactatctagtatttgtaaatcaatatctagttcttataaatcaatatctagtattttacatgttaagtctcccaaatgggttccttacttccttcttgtaaaatccctaaatttttccaatggtttttcggtttaacatgagacaaggaaacatctattttgcttatttagattgttgtatccgtcatcgatgttgcgttggtggaaaatgataaacctttgaatggttcattgatatacatttgaaaatgcagaaagttgagttctttagaatattgcagtcaaaaatagaattcccctgtgaaaccagaacgtagtctttttttctttattctcatgacaactaatgaatttcaagtagaatccaacttttaatcttgtggtatgtggtagcaaaaattgaaaagttgaacaatagtctcaatctccgaaacgcaagaggatgaagtttaaaatcaatgtattcaaacaaaatcttaaccacatgtttctctaaaacaagatccaaaccaaaatagagcaagtgtgacaaaaagaagcacaaaatcgagaaataattagaagatgtctaatagcaaacatggcttcaaagaaggagtgatgcagaacaaaaaccatattgctgcttttgtcctcttcaaacgtcttacttcttcttggtatcaccagccttggtctacactcacaaaacaatgcaaatatcgttaagacaaaacaggcacaaacataacaatagcaaatgtagatttctggttagtgttggtctctcttaccttcttaacaccacggatcttcttcgccctgttcttcctctccttgatctgtttccttgatttctcaatcttggtgtcaagtccattctgtcaatcacatcaacaatcatttcagtatgagattgcaacaccattgtttcatcgcaaagcagtgaaaatcaaagcaccaagagtaagctagactaaaaactagaaccaaaagttttacttaactatcaaacaagtaaagagaaattaccctgataagtctgtacttaggctcaaacttcttagcgttctcgacagtatcatagatcaaaccatatccagaagatttaccacctccaaagtgagttctgaacttgaaacagaagatagcatttgggtccttaacctcatacatcctcgccaatttctccttaagctcagccttcaaacaagtaaagccccacccagtacacaacatcactaagaaacaatacacaactgcacaagcttggattgtaatcaacacaagccaatgtacgtaaagaacatacctttgaaacattggctcttccaggatgaagaacatcaataacctacattaattgattcaaaatctgatgattaatactccaaatgcaacatcgaaatgaatccaaatactaaacatcaaacctaaaagttgcaaaattcaaaatttcctctagcaatacatcaaaatgatcaatgaatctgttcttataagattgtttctacctaaactatagtttttatcattcgatacagcgaagacgtaacactgtgagattgcaaaatggaacatagagatgggaactcacgaattgctttctggcgagaagcctgttggtcatgaagtttctggtcctgatagtgacagctttttccgccatggctgcgatttactttccgagatcagtctctgagctccggttttgaaaatcgacgagtttcgcagcggctttggaaggaggagcacactaaaccctagattatttatatatagctctctttcagattattagggttggtttcgtttgatgggccgaatttaattgggccttacaatatccatgcccagagaatagattagtttgtttcgggtttgatatacaaagacaaaacaattgtctattttgatcattcatgttataaaaacatactttcatattttatttgattaacgaacgacaatatcattgtatactgtataattatttctaatcttttgtttacttatttttgatttttattttctagaaattttcttttaattaatttaattcaaataaacatatatattataaattgattagctgcaagaagtttttaaagtttttccatgtgtttatgtcaattaaatgaaaaatatttaagaggaagctacatggcataagacaaattgcaatcacatcttctctcgattcttttcatttcaaccaaaacaatcatatgtcatccttcaatcctagcatatattaccacgtcataacgattctacacaaattgtcatgttagagcaggtccattggggattgaaaatttcttatcaagaatccttagcaaaataagacaaaatttaaatgaaacatgtgatataaacttacgaacgacctaagcttagagttttttttggtgttaaggttcgatgacgtgtccatttctcattggacgcgtgttttgacaaaacaatatttttttttcagttgcctgtggtttttctcatttctggatatctctattctcttctttggtgcgatggcgattgaacggtctctgatgatcatcagcctcacgcgttcatgttcatcaaatcggaagagaatatcaacgaaattcgtctcttatccactgtcctcatcatctcaaccgacggtggtcaacatggacgagtttggtgaaccaaatcggagagaaaacgtgcataaattggagatttgtgtcaagccatggtccaatcaaattctgaatatatagatctaacaatttaattgtgtatatcgggattaattagggttattgttagattttatcaaaattagggtttcctgaatagggaattttagaagataaattagggttaattgatggtaattgttgacatttctaagacaagaatagattgatactcattgagcttattagaagagaaattgaatagctcatgaaaagctttattgtgcaaagaatctaaagagagagagagaagctttaagattgtctagaagaacaaaaatgattttgattgtgattcatataaatgtttgagggtgactgctcagagaggcagccttggttacatgacaacatcatagatatatatatatatatatatatatcttattatataaagtacggagttactaactcacgagatcatgacacgtgtcaggtctatcattgagatgttgacatatgttaaaaaaaagtttctttaaaaaaaaaaaaacatatttacatatactaatttatagttctatatctaaaaaatttaacttataatttttttaattaaaaaggaaaactaacaataagatgaagtgtatagaattaaattttatttgtattgaaaaattggattgtatttgaattgtatacaatcgaactaaattgtattgtattatgataaaaaagatatttaaattgtattgtaaaatcgaatttgtaagattgaaatttagtttaaggaaatactaaattaaatactgaaaaatatgagttacaatttaaaattcaaatatcatcaataagttggagtgtataaaattaaaaagcagtttattatgatgaaagagatagttaaaatgtatagtaaaattgaatgtgtatgattgaaattttatttaattcaaaaattactaaattaaatattagaaaaagtgtgtggatcactatttactattcaaattttaaatattatcgataaatatttgaataaatttatatcttttacccgcctatttaggcgggccttatctagtatatatatatatgagaactcttagtacaaaacctaataacatgggcatagatggacttctctaataatcatttcttgggcttctatgtttgctctaatacttccccgcaaacttagcagcgggtgtgaaaacgacgttgttaagtttgtcttagatgatcgaagagcttgattttcagtgcatgatctaatgaaggcacataatctatgtgtgctcttatcttctcgaatcagtctcaattttgaacccagcaaatatgaaggattattagcagcaatatgagaccaagaaacatgcacttcacaagattcacttcatgtcttgaaaggatctagattttgtatcttcagaggtagcaataaaagtttctggctaattcggatggcttgacttgggtgagacaacatatgtagcaagatacaaaatcaagatcacttggatgtagatagcagcatctcttcaccacaaaatcagacattagtgtgagaacttttaaggttcttttgacctatttgtctcacgaagagtccgtgttttctttacctcgtttaactcccctaagctgtcccatgtaaaagaagaattctcttcccacaactacttagatcctacttgctatctgctaaatatgacaagaatagattgatgctcattgagcttattagaagagaaattgaatagctcatgaagagctttattgtgcaaagaatctaaagagagagagaagctttaagattgtctacaaaaacaaaaaaaaattcgattgtgattcgtataaatgtttgagggtgattgctcaaagaggtagccttggttacattaatccataacatacattacatatatatatgagaactcctagtacaaaacctaataacatgggcttagatggcctttaaccctttctctaatcatctttcaagctttttgaaactcctaactagtcaacaagataatcaaaccattccaccaatttagtatgaacgtttttcacctaccatagaacttgtatcatcttacgtccatgttttatgtttgttcttaatgttggtttcttgtgtttatttgctcttactgtaggtttcttatcttgtgtctgcaggtggtcgacgatatcacttgtgcaaagaagaaacgacacagagacccatttgcactcgtttggtttgacatcactatcacttatgtttgttgctcttttattttgtatcacttttgtttgttacccttttggctccgaatggagaaagcttatcgggcggagcggatcaagcggatcaagctgaacaaaagcggattaagcagatcaagcggatatagcagtataactgtggatcaaacgaaattagcggtccaaataaagatttgaatggtgaaagcggatcaatattgtagatcatattatataatatttaattataaattaaatgataaataaagtaaatatatctatttaataattattaaaacattaaaaaatatatttcaaatacaacatcaaaaatagattcaaatctattattttgatttttccataacttataaagaagaagatttaacaactattaagattgggatagattcaaatctattattttgatttttccataacatataaagaagaagatttaacaactattaagattggaaaagtggaagaagtgaagaactatggtttcgtagagttggaggcggagagaagtcgagaaagtgaaacccaatattagggttaatgaagcattaatgacaacaatcaaggcctattaggtttactaaaggatctgcgcgtctgtgaaacaggtggttcaggatgcggctcggatcggctttaaaacgcaggaagaattacgattttacccttaattgtctgtttttttctttttcctgtaacgtaaaatgaaaaaacggcttatgtggcttgtcattttgccataacatcaccatcaactgtatctaaagcttccatatccctacattggtttcagaatttgtgtcaataacctctgtcacttccatttcttctacaaaatcatcatctgaaaaatttgaaatccttataaaattatgtagtcccattgtagccattacaactatcttctgcacatgagtattatatctaggaaattcacaaagaatcctatattttttcttccaaactccaaatgttctcttaattatacactcgaaagttttgtccatatagctacagttttaacgaccacatacatttgtaacaactttttgctacttataaattacaaattagtaacagaaaacgatttaataaaacatgtagctaatttgttacaacccgtagcaatttagctacattttgcgagacagaattttttgtaacaaatatgttaccaaatgtgtttaaaatttagttgcaaagttccacaaaccaaaattcgtcgccgattttgtaacaacagttgaatagaatatcatttaacgttttacgattattatcaactagaagatttgtaagtattagcgacgatttatgcattttattttagtaacaaagttgatatgaatttagtatcaaaatttttgttgtaaattttcacaaaacaggtttcgtcacaaacttttgtgacaaagtaagattattaatattgtttaatttttacaacagttgggtcggtagcaactagaaataaaatggagactcacaatatgtttcgtagcaattatgacaactttgtgactgcccctgtctcatatcaaaggccacttagtgtgcggtagcaaattggttaccaaagccactacttatgcgacactataattgcagcaagttgattacaaagccacttcttttgcgacagtcttattatagcaaatttatgatgatgtcttgtcgatcttccaccaagtttttgtttaattattggcttcgttttctctcttgttcgaatctatatatatgcatcattcttctttgttgtatattcattcaaatctttggcttctcgttttctctcttcatatctagcaacaaaaaaaaattctttcatattcattctaaaatttttcatttgagcaaaccgtctcttttttctttttaatctattctattatctttttctttgtaacaaaaaaatgtcttcaagcaataatatagaaatcgtaagaaagtggatgtataatcgtattaatcgacacactggacatgtattcgacgaatatgaagccgggataagtcaattttatagagtttgcaaactattgattatatgatgggatcgaatatggtgtccatgtcgaaagtgtagaaatgaagaacttatttctattgctaccgtatctaaatatttgtataatagacgatttcaacccaactattatgtttgaacagctcacggtgaggagtttgagcacagaccgctcacggtgagtagtttgagcacggacaccaattttacgatcaagccgaagaaaatacatttcaaacagttgaaccggaatggaattttaaaactagttatattggagatactgtctcaacggaagatatgtcaataccacgatcaaggtaaattattagttatatatatatatatataatgaaattgaatttaaaataattaattaaaaagtttttctttaaaaaaaaaaatatatatatatatatatatattgctcttaaaatttggttaatagaaatattaattcgatttacattaaatataaatatatagaaattgataattagaagtggtgtgctagctatatataaagaaaaactatgttctattgtatattttattttctcttacattataaattttctttatcttaattcatatgtacaaaacataaagtccatatataaataataataatacttattattaattcagtttcatcatataataataatgtttttacatctactagaaattaaaaatttgaagtggtatgctataaatataaattattatattagatatatgtgatcattgaaaatgttataaatcttatttatcttattccatacaaaaaattataatccatatataagataataataatacttattattaaagataaatattcaaataaaaataaaaaagaatgatgttataatttggttaatttaaatattaattcaatgttgttatataatagtatttttatgtcatctgatagaactcgtgtatataaatatatgtatttgtgtcatctataatagaaattcttaaactcatttgttaatgtatatcaaatatattatttaaacatggagggagatatatatatatatatatatatatatatatatatatactttttgaaaatgttataaatatagatctttcattagtactttcatttaatacttactttaaaagtctattaaaaagaaacatatatatatagtagtaaaatttggttaaaagaaatattaattaactcaatacaaatatcatctaacataaattaataattagaagtggtatgttataaataaaaattattatattagttatttcttatactcgttaaaaatattataaattttatttattttagtccatacaaaaaataaaatattaaattcaattttgtcatataatgataatttatgtcatctaataggacttcatatatatatatatatatatatatatatatatatatatattgtcatctccaggaacgtcgagaagggggacaaacagctttgattggatccgatctggtagacagagacgaagacaaagatgaataatttgaagaagatttctttgttaatatatcaaattataaagatataattgtgggaatttctaattagtatgtacataagaataatgaaattccattaaataaataaatatattacttaattattaggaaaatagaagttaattaataaagaaattgtgcatatcagatagttgaaggttgtttatcaatttaattgattatatatatagaaaagtatattatataatttaattaattttttatcgttttgattaatgtacatattactaaaaatactgtacaattttatgaacccgcggttgaatataatgcttgggaagcccataatcctgagaatgcagattttttcaaccgtttaaatacagcaagtgagcctctatatgacaactgtgttgaaggcttgtcaaaaattttgttggctgctgatatgatgcacattaagacgaaacacaatcaaacagaagcgtgtgtcgatgatactccggacttgtttcataaggttttaccaaaaggtaatattgctccaagaaattattatgaaacagagaagttgatgcagacttttagtatgtcgtaccacatgattgatgtatgctaaaataattgcatgatttattggggtgatcctgacgaaaatctaacagtttgcaaattttgtgaacatccaaggtacaaacctcggaaagcatcggttcgggctactagaatgcatattccatacaagagaatgttctctttgccaatattatacggctcaaaagattgtatctatccgaaaagacagcaccaaatatgagttggcacgcagaatatacatgtcttgatggagttatgcaacatccttttgatggcaaggcatggaagcatttccaatatcttaatcctgagtttgcatccaaaagtagaaatgtttatctcaggttatgtactgatggttttaacccattcggatcgtctggtggtaactattccctttggcccataattcttactccttataatctcctgccagatatgtgtatgaaaagagaatatctatttcttttcatactagggccagggcgaaaccatccaaaacggattttggatatttttttacgaccactgatagaagaattactggaactttagatcaatggcgttgacgcgtttgatatttcagtgaagcaaaatttcaatttacaagcagttttaatgtggactataagtgactttcaagcatatgggatattgtccggatggacaactcatggaggaatgtcgtgtccatattgtatggatcaaacggatgctttccaattgaagaatggtcgtatatctagttggtttgactgtcatcgaagatttttacctctagatcatgtttttcgatcgccaaaacgaaaggtcttttcgaaagggtcatattgtcaacaatgtcccaccatattttttgtcaggagaagaaattctggaaggtcacttggcttattattatggggtgaagaaaacagtggaatgtggtggaaacagtcatataaatagtgacatcgaaggatatggcgagacgcaccactggcacaaacatagcatcttttgggagttgccatattggaatacacatctgattcgacatattcttgatgtgatgcatatcgaacaaaactttttcgataacttgattaacaatttgttaaatgtcacaggcaaaacaaaagattctatcaactcacggaaagatctcgttttatattgtaatcgaaagaaattacaccttacatcgtctggaaaaaaccctgttcaaatattcagggtgtctcctcaagcaaaaacttcttaaatggttaaaagatgtggtgaagtttccagatgggtacgtgtctaacataggacaatgcatacacattgatcaaggaaggcaaatgtatggtttggaaagttacgaatgtcacgtcattatgcagcgactatttccgtttgcattcgctgaactccttcccaatgaagtccatcaaaaaatatcaggtaaattagaataatttagcttaagtgtacttacatagttattaatctgtataataaacttatttttgtttttttttacagatgtaagaatatttttccgcgacctttgttcaagaaatttgaaagtcaatgatgttgttcgtatgaagagtaatattgtgctcacactttgtaatctagagaagatatttccaccatttgtttttgatgttatggagcacttgattattcacttaccaagagaagccgaactttgttggccggtgcagtttcgatggatgtatccattcaacgattcatgtttcatcttaagaaaaaggcgaataacaaagcaagtgttgaagggtcaattgtggagcaatttattaatgaagaaattacaaatttcagctctcaccactttaatcccgaatcgactattgtgtcgagtagtgctcagagacgacatgctagtggtttgcctcaacagtacatctactcgtacgacgacgtgccgacattaattagaaatgtcggaagtggaagtggaaaatcatattatgagtggttaaccgatgatgacaaccacatcgctcatacatatattttgctcaactgtgaagaattggcaccattcaaaaggtcattaataatttacatatatatatatatatatatatatatttataaacgtaaaatgaaattttaattcttgataaaaaaatttccaggctatttgataacgaagctagagaaagatatgttggtctcacctaagatttgttaacgactatgaaagaaagagacttttcaagttggttatatattttggtaagttttagctacatatttcacaatttatgatgtgtatagctttgtaattaagatgtattatatacgatatcatgatcatctcataatgtgttcatacaggttcatagtgatcacacgaatacattgtatcctttatggttacaagagcttgtgagaggtccaataagacagtgcacatgttggaatgcatatttttcacgaggttataattttcatacagtaagtcatgcaatgaacaaaactacggctaactacggtgttagtgtgcgtgagagctctgaatacgctcaaacttactatggaaaactacaacaaataattcagattgcatatcatggagctgttggattgaaagttacattattttgatgcgattggtatgatacgacttttggagttgggactagaatttataagcctggtgttgttgaggtatgtgcatctcgtgtgtatgagaagtatgatccatttgttttgacaacacaagtagatcaagtttgttttttgccatattcacgtgtaaaacgacgttttgaagaatagttggtagtagtgaaagtctattcgagagaaatacttgaagaaatcatcacacaacgagaatcaatgcaggaggaaaacgacgatcttcaatattctacgacagtcaatgcattgaatgtaagttaactaattttacctggaggacagcttgaagacattcccgaagatccactaggtgaagattctgaagatcatgatagcgatcttgatatgacaaattcagaaagtcttgaagaattcaaaagttccgaagaagaataattccattgcggaaatgattattgtcttgggaatttaatgttttatagccaagtttttctatttgattttctaaaaaataatatgaataatatgttttaccttctcttgtattaactctcatactttaaatcgcttgaaacatacccaaaatattttgttgctggaataaaaccatgattattatagaatataggggtgggcatttcggtttaacattgggttcagtttggattcggtttcccttctcttggtttatttgggtttcgtaaaactctaaccatacacaaccgtagttagtttggtttgctttgtgtttgggtcagttttagttcggttcgatttggttttagttcggttcaaaaaattaattaatgtatcaaattctatgtttaaattgcataattcaaacaataccaaaaaagcaaaacctataaaaactcaacctataaatatttagagttatttacaatatttttaatattgtaaaactaggtacaaggtatagaatgttttctgatttattcatgaatcgagtacaatgtttatatacacagagagtctttctctccaagtctaactttctctccaagttaaatttaccaaaaaacccacatgagaatatttacaagatatacacacgatattcttttggctaaccccccccccccctcaagttggagcatatggattgtaaatgcccaacttgaccacgattgactcgaactcacgtcgtcccaatgccttagtaaacacatcagctaactgatccgtagtatgaactttccgagtacgaatcgttccattcatgatctcatcccggactccaggacaatctatttcaacgtgttttgttctttcatgaaaaacaggatttgcagctatgtacaatgctgcttggttgtcacaatgtgaatctatgggcttggtttgattcactcccaagtctttgagcaatgctttcaaccattttaactcacatacagttaaagccatggatcgatactctgattcagccgatgaacgagaaaccacatcttgtttctttgctttccacaaaactggtgagtctccaagtgttataaaccagcctccgacagaccttctactcacagcgcatcccgcccaatcagcgtcacaccaacctgccaacttcaaatttgaatctgacttcaagagtataccttgtcctagtgttcctttcaaataccgaacgacccgcaaagcactatcccaatgatctgttcttggggctttcatgaactgtgatagagtgttcacagcatatgctaaatcaggtcgtgtcgccaacaagtagatcaaacgccccacaagtcttcgaaaccgctctggattatccatgagtggctctttagagtaactcagcttgtgttgctgctccaacggagtgctgactggtttcgatcccaacattcctacgtcttgaattatctcaagagtatactttctttgacacaagaaaatcccttctttgtttcttgctacttcgatgcctaaaaaatacttcagagatcccaagtctttcatgtgaaaacactcccccaagtatttcttgaattttctgatttcttctgaatcattacctccaatgatcaaatcgtcaacatatactagtatatatatttctgattttcctcttcgtaaatgaaataaagaataatcagctcttgactgcttaaacccatattcaagtagtgaaccatgcagctttgtgaaccaacatcgtggcgactgtttcaacccgtaaatcgattttcttaaacgacaaaccatgtttttatcagaaactttagaaaccgaagttgtttatatgttctaaagttgtttatcacttaaaaaaactgaagttgtttagaaactaaagttgtttatttggtctttgatttttctacaggttatagcacttcaaaatggaaggatttttggtgttggaggattcaatacacgcgagcgaggtgaaagctcagcagctggtgctttgggtagagtcactcttgaacgccaagtcataaccttgcaagagcagcaggcatctgttgtgaagtgtctgaaatagtacatgccaaatggtgcgccaaactttggctcgacgcagcgaacacaaggaaccgacgcttcagtgaccagtccagaccgtgctaacaacaacatggagagtgaatatgctgatccggaccaagatggagttgatcatgtgaatgaggatgctgatgaggctcttgatggtgaggatgaagcaagtgatgctgcctttaagtgatctactctttttatggtttgattattatttaattatggttacaagacatttatcttgtttaattatccttgtttaattatctttgtttaattatgcttttcatcttattattaagacttgtgtaagatataatcaactattttgatgtatgatattaattatgcctttctgaatttctgtttatacattagaattttttttaatgcaaaacgagttaatacaccaattagaatgcattaaaacagaattagtcattttgataagttggcaacaaatatagaaagtatagttaattgtaactaagaacaccaaaatagtctacacgagttgttgctaattgctactcgagttgttattaattgtaagttataagtgacaagaattacgttacagatttgttattacatttttgtatatacattgtaacaattgttacaagaatatttattgcacataggtttttccgaaggtaataagctgttgcaattaacttcaatgaccttgtgagagtttgtaagaattaacacagagagttgtgtcacaatttgtaagaatttgttattaactcatattgtctcttcgttgtatcatttttcacatgtttttttgttgcatttcatatcacttttgttattacacttttgtaattaaggccttgaatggatgctgattttcgattcagtttttggatttagattttagtttctagattttagattttagttttaggccttgaatgttttgtagattttgtaagagtttttggattttgtttttcaaaaacttattttcataccaatcaagattttaaaattttggtttccctacagtttagaaaaactattttgttgtagttttccattcatgattttagttttttagttttcct

SEQ ID NO: 122 - DNA, 16898 bp, Arabidopsis thaliana
gatcttaaaattattgtatttataacaataataatttattttctttgattttataatactaatatttagctaacgagataatatagacaggtttatataggatgacaggttttgatcgatattaatgaagaaaggtatatcaagaatgaaatcttaaaatttacaattaaaatacaattgtacaatcttaaacacaaaaaaccatacaattttaacaaaacgaatataacttgaaatttaaattttttagctataaaaaatagactcacggtatactgcggataaaatattcaaaattttaaaatccacgatacatcgttacttaaaaaatatgtgttttcgtacctatacttcaaaaattgaaacctaaacaatagtaatcatatactaaataatacagagattgatatctacatttgaaaatacaaattaatatatatcttcagttagtctttttaaaaaataacattatatttttgttaaaaatatagcctcgcggtgtaccgcgggttaaactctaataaagttgatttttcaaaattgttaactcacatgatcatgagacgtgccaaatttatgattgttacacatatcaaatcaaattttgttataaaaccctctaacttatctatttttgcatctttattatcgacctccaacaaatgcataataatccaatgaattctaaaataatactcactgtaaccctttttgttcattttttgctaccaaaacattttgtaaatgcattacattatgcgtcgagaatatatcatatatattgggaatgcattacattatgcgtcatgattatgattttgagaacgagagtaggaaaaaatgggacatggaacgggaactacgccgactcctaaatatttttatttcactcaagcgggtttaatgatttttcgactgttttaatccaatttgatagctcacaagtttaatagaaatttaacgaggaccaatccggttgagttggaacacggtccgaccgctggatcattcctaattttaataaaaatgaaccattattatttgaactagattttaacccgcgatacaccgggaacaatttgttttttaaagttattatatataaaagtttacaaattgtatttatctataaaatattttattttatagtttacaaatgttattaagtaacgtcctgccaaacccgtcccgtaaaaaaaacatttattttattaacgttgatcttatttatgatatgtttataaatcattgtctatagattttgtaattttgtagtaattaaatgctatcaaattatatctctgcgctttgatgattataattgaattgttatagtcatggagaaaagcaatatcaaaaatgataattttgtagtaattaaatgatactccctctgtttctaaatatttgtagtttaaggtttttacacacaaattaagaaaacatacaaatttcatttaatttatctatttcctataaatgcatcattaattacaactaatccaaccaataaaaaaatatgagataaaatataattgattaaaaactattaaatacatttaatttttgtatagaaaagtgaaaataacacttatattgaaaaaaataaaaaacctttaaactacacttaattagaaacatagggagtattaaatattttggaagttttattttagtaaataatcgtgtagttaatgtggagagattttgggaagattgttaaatgtcaaatatttaattcgaagattttctttctaattatcaaaaacaaacattaaatttcaatggcagccattgtaaataaatctcgattacaggatttatttcacaaaatgactgcaaaaatgtatatatagtaatgctagtaaaccagaatgaaaccaaaccaaaaacaaaactaaatatccaactggtatgaattcatgttataaatatatatcaaataatttatttataacctacgatgttataaacaggggcggacccacattatagtttgtaggggcagttaccaccagtaatatataactaattaaagtttttagcttaaacaatatagttaaagtagcaaaatggtagagattgcctccactaagtgctgaagatagcaggttcgattcccatttatttacattttgcacccacttaatttcttggcggatattttaacttttaaactcatgtaacatcttccggaataaaattcttgattctactattttccaactaatctacacacaaagtcaattacattaatcacctcgtgctatagcaaggtttagtacctagataaaagttaaaaatgtaaaattagaaacgaagatgtaaataagtaatatctaaggtaacaaatttagatatttggaagttttctgtttttggttttatatacaaacaagatatacgtgctaacgtaatgaacaatcaactagaattatccctaactgggagaagtttaatactttcttgtgtactaccaatttttttttcctttttttttttgaaattcaggaggttctgggtcgaagctcgtaatctccccaggcccgaaaccacatcatgtattattagtttcgtcccaagcatcactcgaaccggcgacctctaagcttcgcctagggtctttaccaattgagttaacaacacttggtcgtgtaccaccaattactctcttgttcccttaagaaccgtatcaaaacaatggaacgctctcttcaacgacaagacgttcatcaacaaccacaagacaacgtatcgattcatcttaacaaccaaattcaagatttattcggtaagcattcatccgaagatagaaatatatgaattaaccttagatattcctggtttagaatcccagatacctaaaaacatggtagattgattgctacgttgcatggagaaaggagctgtggtttggaacccatgcttgagacagagtggatagatcgagcaagatttacaccaaactcaatggaatcctatggcataggatacaacaataaggggagttacaagatcattgctggttgtcgtctgaaggaacatcccacaaagaccttgtggacaatgcatgactttgcctccaatgcttggaaatacctcaagtcagtatctggtagtgtaatagtcaggaaggaaaaacggctgaattgaagtactcaccacaagttgtgtattatttttgatgacaagactgatcccatgtacacctgccctatataaattcaattcctccagggaattctttttcagattttgtcatctaccatgtggaacgatagactatcgtaaggatgctcttgtactcagggtttatgagggggatcaattttcattgttaaatcaatgccatgcaacaaagaagattgaggtctgggtgagcaagtacaagattaataataattgggttgcctgaatttttaaccctatactagttggagtctcaactttccaccataaacttttaaccacttgaaaaaccagcataaacaattttaatctcgataaaactacatgtactttcggatttgttcttaaaactacgtctccaattgaacagaccagttaaccgataattatacatccggtttgacttacccataatttaaccgaaattaatccgattttgactctattttagcctaattttgacccaaacaaaatgtaaataaattatcttattaagaagtaaaattatttttattaatttttatttgtgataaacaattaaaaatattaaattataacttaattttagcaaaaattattatgacaaaatataccccaaattatattttgagctacattttgttataaaattttgataatatacaaacatatacattttccttttggcaatcatttatattttttataaatataaagctatgtctttattttaaacaaaatattcattttcttgaaatcataatatttgacctttgaactttatatatgtaatgaaattcaaaatatatgccaaatttatttttatatatatccgtaaacaccataatcaaagtatatattatggtatttataaattcatttttctttatagattcagttttctttttatatatttcaagatgagttatatatgtatatatatatatatatatatttatatatgattatggtgttttaaaaaagaaaatgacctttgaattattaaatttagagtatataccatatacatttatatatatatatataacaccattgtatttataaaaggaatttattgtctattttgttatattgttttgcggtatattttgtttattaccaaaatatatactaaaattttattatataattttgtgtggtatttttttatttttttattttggtaaaattaatttattttttttaagtttttatcaaaaataaataaaaagtatttttcttctagagaatatattttttgagtctaaattgggttaaaatagagtcgaaatcgaataagttcggttaaattttggttaagtcaaaccggatatataatttttggttaactggtcggttcaattggaggtgtagttttaaaaacaaatctgaaagtacatgtagttttatcgagattaaaattgtttatggtggtttttcaagtggctaaaagtttagggtggaaagttgagactgtcacctaaagttcatgaaactgtcaaatccttacttgccggatttagtagaccgaaaatactctaagccaagttacttcatcgaagataaaagacccgtagtgtgctcttgcgatgaaactggtcgggcttggatctatgttttcagggaaaataagctgaccagtaaaacttagatagataatgtggttgatccttgaccttcgcattctacatttattcccaatttggtacatgttcctcaaggttaaagagaagaactagcagagttaaaactttaattttcttacatttgggcttcttgtttagttgttgagggagctaagtttgatttggattttgcattttggtgctttattcacaaactatcctctttgttggaactagagattgtttttggtaatttttgttttttttgcaacataaattatttattgtttctagaacaaactagagagaattgcattcactctcgtggtcttggctttgttccgataataaaaatatgttagacttcacttgttgttgggtcaaatatgactaagctttggtgatagttttaatttacctagcttgtgtacagaatttaaatacatgatggtatgaagatcaataagtagcaataaatggaaattttctctttttcctagtgaataaatgtaagagttccatattttatactagttaatacttactaaaatgtaaaatttacaaatttcacggatgttttatatgtatgtaaatttttgtgttgataaatgacgatatactatatataaatatatgcccaatggttgaccaagggtttattaatgcttctacaccaagaggtcggggttcgagtctcagctactgcgatttattagcagatttgcagattaatggaggcaagtgtgcaaaagatctacaacgatgtacaattatagccgttcacctaggattctacgcagagaagatattgaaggtgtccatcaagcgcatggagaaggagaatgatgtgtcgtctgccatagatctaataagggtcggaaggaattatccgtggtagaatcgtctatgtaacaattctcataatttgtaataaataataaatctagacggtaaaaaaaaccagaaaaaaaagacgggagaaagaaaacatttgtctgtgtgcaatatgaaatgtatttgaacatttccctcttttaacttggtatatacatattgaaaactcggtactcttgtagccttgccattttcaaatataatagttgcttctgactcagaagttctgagtaatctggacaagtagggaagaagaaacaagcagaagttaccatgccatggagaggaattgagcttcaaaaggttaaccaagagccatgaacgattaagtgttttattgtaaaaagatgaaaaattagttcttatctttaaaacatgcaaaatttagcttgtcattccattgtattcctccaaacacaattacatagcctttagacgatcaattagagccttgtgcatcatatggtcctcattaggaacaacataaaaaaactaaactaaataattaaatcgaaccaaaattcatcaatttaaaactgaattgagtaaactggtttaagaaaaacggcatttttgattgatcaagagagttgatttaggatttagactacatgatctcgatgtaaagggtgcaaactaaacaaaatgatgtcagaatctagcaaaattttacatggtgatttgtggcaaaaatctcgcgaattagttaaatatttaaatcgtaacagagaaatcttcctaacaaattgattaatatttttgtctagttgaataacctccaaaaggaaaaataccgtttgagatagtttaatttagtttcaacgaatacatattagatcttagacaaaacgatctaccggatcaggtaatttaagttggttaaaattgtccaaaaattctctaatgccagacttgatctagtcccaattagtaagaaaatgagtactgaatataaaaaaacaaaaacctcatctggtgatagaaatcgagtgtaacatcatattttttcttacccatttcatcaaaattccacataaaacaggtttgccatttacttattacaccaaaacaaaaaactggttgagagtagaaacaaacttgacttgggacgaaaatactcttaaaagtcaaaacacaaagattcgaaaccaaaacaaaccaaaccaaaccaaactgataaaatcctaactaaaaaaaagcatttactaaacattttaaaataaataaaatttcccggaactaaaaatggagggaaatacgacgttacaataccaacaacaataaaatgacgaatttacccctaaacacaattatatctccattattttctcgattcgcgcatgtttctctcaagtaaataaaataaaaatcccaacaacaaaacattaaaaaccctttctctcttcccactttcacatccatagctaaacccttgaagaagattgtttagtgtgttctcgtctcttcgtttatttcttctccaccgatccaacaatgctactctccggtcaatctccgactctgattcgttaatctccctccgtctctctcgtctgattccttccgtatctctctctgattttggccagagcacgcttgataatcaaaatttctccggtacggttatgtaatccgtttcctgattagggttttgaatttcgtcttcgtattgtttctcgatctgttatgatcgtacgtttttcgtttattgttcgtcagttattttttaattttgattttgattcgttgtgaaattttgactgtaggggtctttatatgactgagatttgagaacattgtgtagaaaagtaaagaaatgttagaaactaacgagcaaaagggttttgatttaaacgtgtgtgcttcaattgaagatttcagtgagtctgacattaaggctgagggtgaaactgatagtttggttgatggtaatgtggagaatgtgattgagattaaggataagaaaaaagtgattgagcgtgagattctcattacgcgtagggttcttcgctcaggctctgtggcaagggatttagtaaacagtgataaacattgtaaggctgtgaaaaggaaaggaaatgttgttagtggtggaagttctgttgatgaggtgaaagaagaagtgaaacaggagtgtgttaagtctttggtacctgaggagattcgtggagatgattttcgaagtgaagtgaaagtggaatctaaggatgatagatcagatgatggaaaagaagagaaagttcaacgtaaaagaggaaggcctcgaaagtttgggatgagcagtcaatctgatgataatgggttaatctcaaattgtaaacttcggacatctttaggtaagaagaaagaactggtaggcgatgataatgttgagaaacttgttggtggaagctgctttaacaaggagaaagcagaagtaaaacttgagcatggggaatatgctgaagataaagagattcttggacttgattttaggagtcaggttaaggttgaaatcaaggatgatgaatgtgggattgttgagctacatgatgaagagttgcaagttaaacgtaaacggggaaggcctagaaaggtgcagatcagcagtcaatctgatgagagtcgccctaacacaaactgtaaacttgcgagaactccagaactaagtagccagtcgagtgttgacagaattagtttgagtcgtctgcgtggtagacccccaaagaccaaggagacctcggttagcctttacattgaaaaaggacctgagtctaatggaaggaggatggtacgtaagcgtggaagacctccaacaccacagaaaaagaggaaatcggggatgacagatgaatcagattggaaagcaaagaagagactgaaactttgtgagagtccgttagagtcacggcacaacaatcctttaattgatgacgaaaggatgattggcgaacaacggagtaagcaaactgaagctggaggacattcgagatcaaagtctaagaaaatgctgagtgacagaatactgcagttacttctaactgctggttggactgttgaatataggcctcgaaatgggagagcttatcaagatgctgtgtatcttaatccagagggaaagactcactggtcagtgactaaggcttatcaagtttataaaaaacaattggaaagcaacccgaatgatcaaaagaactctaccactggttctggttttggcttgctaccagaagaagaccttcatctattagagagaacaattcagaaaaaaaggagcgatacaggtaagcaaaggtcaaaattgaaggacagagatactaatgacatcttggtttcaacaaagggaacaggaaaaataaagagggaagaaaaacatagtagaaagcgttgtactccgtcagctcgtagttctttgaaagatgtggattccaaggaggatgggtacatattatttgaagggaaacgcaccatgctgggttggatgattgattcaaccattgtgccacttaacggaaaagttcagtgcatggactgcaagaagacagacatacttctagaaggaattatcacaaaagagggtattcgatgcaactgctgtgatgaagtgttctctgttctcgatttcgaggttcatgctggcgggaatcgcaaccagccattcaaaagtctgtatttagagggtgggaattctctcttgcagtgcctccatgagtctatgaataaacaaagtgaatcacaacttaaagggtaccattttgtggactttggttcgggggatccaaatgatgacacatgtggtatttgtggggatgggggagatcttatctgctgtgatgggtgcccatcaacattccatcagagctgcttggacataaaagtaagttgctccttacgttgtgaaaattttatgttaaagtgggcttttctgtttcttctagacttaatttctcttcaatctgcagaaattcccttctggtgcctggtattgttacaactgctcatgcaaattttgcgagaaagatgaggctgctaaacatgagacttcaactctaccctccttatcgagttgccgcctatgtgaagagaaatgtatgaactatacactaaagccatcttatctgtaattgcatttatatgtatatgctctgttaaacttcttcaaacggacttctaggctctaagcattaccctcacactcttgcagatcaccaagcatgcatcaaccaagatggcacggtgcctggtgaaaggagtactgattcattttgtggaaagtattgtcaagaggtagccttcctttttcttttttaccttttatcctggcgctttattacttgaaacgctgagtatttcatttgtttcttcccttctttttctttaatttatagttattcgaggaacttcagttattcattggagtaaaacacccactgcctgagggattttcatggtcattccttcgccgctttgagctccctagtgaggttgccgattgtgacatatctgagaagattgcatataatgccaaaatggctgttgcattttctgttatggatgagtgcttttcacctttggttgatcacaggagtggagtcaacctgcttcaaaacattgtttataattttgggtaagctcattcccaaaacctgtccttatatgcttctgttttgttcaattggtttattggcaagtgttttatggatatgtaaacagtccgtatgttactacttactagattatgtttaaactttttcctatttttttgtaggtcgaacttccatcggctagatttcagcagttttctcactgctgttttggagaggggtgatgaaatcattgctgtggcgtctattaggtatgcctttggtaccatgaaaatgagaacaaggggtaataagtttctagacttatcatactagacttaaaagcattacttagatgtgacattacactgttcgtatcatactagtggactagtggggcaaacaagattagaaaaccactttgtacccctttcattatactatttcttttgttaaggtacagagatcttaagtttgatagaacacactacatttagatgttagcagtttatgtcgtactaagataaagaaattccctaagtatatgcctctacatggtctcaggtgtttgattgaaactctgttgccgggttctcgataaattgagaatactaactgtgtatagaaattagcttttcttcccataggactgatatatctcttactcaggatacacggcaatcaactggcagaaatgccgtttatcggaacccgctatatgtacaggcgtcaagggatgtgtcgtcgactaatggatggcattgaatctgtaggccctcctccacttcttgtcatatcctaaattcctttttctgttagtttggtggttatttacattaaagttcgtcgcttatttctctcaaatgtttcttgctatatctgaagttttattagatgtctggcaattctgctgctatcctgcttgttttggcgacgggccattctgctttttctcaggttctttcaggcattaagaaagaaatatggaaatagctttgcatttccatgtctgatatatgctaaatgacaaaatgattgctagatcacactgaactaaaaacatggatttgtgtagtcatttgatttcaaatatgtataagtgactttataggatagttgatgcgaactagtcaagcttcttagtatgccatatgtcttgatctgctgtgtactatctcagtcttctgttttgtttagtttagacttcattctgtgtacgatttctgaagatccatattacaaatgtgctttatcatcaggcgcttggttctctcaaagtagacaagttagtcataccagcagtgccagaactgattgatacatggacttcaggctttggcttcgcacctgtcaatgattctgagaaaaaaacaattaagaatctgaacttgttggtgttccctggcgtagacatgttggggaaatcattggtgaaggagaagatcactgactcagttgtttcatctcccaatggtactaactcagtttctcttggcatctgaactttttaaaatgttcatgttatgtgtacatgcatacttgcatctattgactgacttaaatctactccaggtttagtgctgttggcacctgagatgactttgcctgtagatgtcgaggaaaataaacctgaggagtctaaagacagtgcacacgagcgaaattgtgcaactgctggtgttgaatccccttctaacccagttgatagctgcttgaagttaacttatgtagaagagggggataatgacagagaatccaatctcaagttacttgacgggtccgtggaagagaaagaagacactaagaaattgacagatatagacatcaattctcttcctgatgaagttgatgattcccatgcggatcaaagtgatacaaaagagcaggaaattgatgataaagaagataagacaccgttatctgatgatggctgtgaaggtaaagctgagggtaccaaggagtcaaatcaacaaccggatagtaacaaagtagataactctcagccacttggtaatggtggtacaggggaagagcttggcaacagaaccttagcgctaaagagagaagtgactcccacattgcgagcatcgccccgactgattcaaagatcgtggagaacatcacgggtgaaccagaagttcacaggtactactaacgccgtactgcttgactctccacaccggtgtgtctgaggctcattgcatagacagagcttttgtggttttgtgcatatgaccagtctaacacattttgtctaaagatggagcagccctttgctatttcggggtgacaaccggaaaggcgcagttgaaagaaaaagtagttagaattctaatttcagtactttagtaatttcattagtaacacatcgagccagaggtcagaaaccttgcagtggctcaatgcttattagacttaattgtgtagtaaacaatttctttcagctgtatttgagctgcttcataatatcatctaatgttaaaacatcttctggcttaatattcaattaacttattattagataccataaaaccaacaattagcaaacgaagataactttaatagtttaatcaccgcatttaatacctccaggaccaccataagacatagcaataccaacctgatgatcaacatatcctactaaattaacatcatagcatacgttgctgtccaccaaaggctctgtcatagggtaattaaatccggcatgttcatagtccggttggattatggtaagatggtcaagataaccagaccatagacggtcatctttgtttggaagacgaccattacccatcggtgggcttggagttcttggatcacctgaaaccattcctccaaatccaacgaaatcagcaccatctcctagaagattaaacaactcctttggccaatatcccaaatgatttttagtatcatcatctggatttgtttgtgtaagccaccagttttttgtttccttgtccttttacatgaattagcagttgcaaaaataattacaaagtattcgtctaatagtattgtcaagcataattcattgttttcaattgttgattccaaattatgctcttagtctatgctctatcttcatatgtataagaaaaaaacttatgatttggtataagaaattctgtacctgatgtatagtaagccagagaagataatcaaacttgagaggtacacttattggaccatttttggctacttgaacaaatcctggacattttacattaaaacagcctgttccatgtttcccctaaaattatataacatgaaaacatcaaaattacataagatatgcacttgattaggagaaataattcataaaaataaatcataactggttttaccagccatgtcccatacgaccatggtcgtttgtcgccaaatagttgttcattgatctgtaaatgatagtaagaaatttatgatttaccacaaagatttaattaggaaaacaatatagaagatgaaaatatgtattaccatccatccaacttgaatagaattggcatcaccactgaatgctctggctacataagcttgagcacttgtactttgatttttatcaattatcaagttataagtccttagccctgcttctacgcctctgtaattatgtttttctactactttcattcccgcaatctgtaaatgtgtcaattcaagttcaactaacatatatgcaaattactttttacatgtgtaaatgtttttgctctgtcttaatatataaatttcaatgcattttgctaatattcaaccatgtgaaaattttcttatgataggtgtttcatatttaacatatacgatttcatttaatgctgaatttaataaatttttgtagttatctatgttcattcttaccattttaaaaataatgagcaaattttgagagttaacgaatcagtttaagttttgaaacagaaaatttacaatttaaactttttaaagtatgaaagagatttttaaaattaataatatatattgtattttatttttgggtttttgcaaatcatacaaatgccaaagtatgcaagagattttcaaaattaataatttctattttatttaatgtaatattaatatatcacaatgaaaaatatagaatagtatacttacatgggtacccggatatttagctgtaagaacggtaaaattattgatggggtattcttgatattgtatgacatgtttttccttggctcttaaaataggaacggttccatttggacattctattttattgttgtgtcttctttctgcaaatttattctctgattgagaatcccatcctgttggtttcatctaataggaaaattaaaaaaaaaaaaaaaaacacatgtaagtgttaaagtataatgttcacttaacatactatcttaattgacgtacggtatatgatgccagtttttatttctggatatgtttatctattgaaatatagaatggttaacaagaataatgaacattttgaccgactcttaaaaaaatcaaaacatgtcttagagatttgttgaaaaagactttccaacaaacacaacgatcgcaaaagacttcccaataataaaggaagacaaaattccatatagatatatttcatgtcttttaatcaaaaaatagattaaagaaaaatgcaaaacaagatacccgaatattatgatgtttgagcaatggatgactaagagatggttgcttataaatatccatgcagtcgtaaataacatttttacccaactacaagatgaaaaaaaatcacataaagtaaaaataacaacactaaagaagatcacagtattgtatttatgtatttcactttaccttgatggatttcatatgtatagtagattcaacagataacactgaaaggataaacacaacaaaactcacaaagatatccattgaatcacaatgtaatatcttccaatttgtttaaattttttaatgtttcatcagtagtgatattatgttacgatataaataaagatgtaaaatgttgaatgcattaaaatgcaattaatgtttatataattaattataaagcttttatctttcaacctattattaatgaatatctgggagtatttaagagatttctcttgccatttggcaatagttctttttttatcaatataaaagtcatgaggcaaaatcttagcttagtagatgcaagcaaaaaatcataaatataaagttacccttaaatgtatcataattttatgcatccaaaaattaatagtatctcataccaataataatgtgccacaataactaactttattttgaaatagccaaaataactttgctttagaaaactgaaataattaaaaaaaaaacaaagaatgttatgaataatagatggatgcccattataaggctcatcatctagatgtctctagggttttacccttctcttgtactcctatataaaggatgctttattcaatggaataacacactcatttcttttatctctttctctggttataacacgttatcagcacgagtcctacctagctgagtaaaccctagccacctaagaaaacgaaaaaaaaaaaaaaaaaaactagccgcctaaacaaacaaaatcttaagctaacaagataagttttctgttcatatttgtttatgcacgaattatgcacaaattatctatcattagatctgtctgtatttttacacaaattatgaactaattatctattatcagatctgtttgtatctctatacgaattatacacttattatctattatcaattctgtttgtatttttgtacgatttatgcacggattatatgttattgattctgaactgttttatgcattatatcgcagaaaccctatttttgcacgaatgatcagcatctggatttttgcacgaaagataagttctcttccatacttttataaagataaagatctaatgtttctttgaaaattaaactttcatagttgatgcactattagttttacgttaatagagttgaccatgaatattgtttaccctaaatttgcacgaaaaaattatttaaaagatctgtattaatttttttttaatttttttttgagtttaaaagaaaaagaaaaaagactgttcattgttttgccctaattttgcacgaaattattttacccaaattttacacaaattcatattatcctaaataaaagttttgtcaagatatatgtaaaatccagattttgcacaaaatagttttattctgattggttttacaatattgcattaaaattgtatttgtatataatacttgattatttttatgaaataaattgattgataaataacttaatttaaaggtataatcacttatagaaatttttcatgaatgaatagtttaatgtatcttaagaagacatcataattttgatgttcaaagttttttcaagaacttaaattatcaccaaaaattgagaaaataaatatggtaaaaaaataagtaaaatttctaacttttaacgatgaaataatctagtatatcaagtagtttaaaatcttattaaaagactctagaagagcatatacattgttttctatgggaatacaaaattaaaatcatcgatgcggtatagttctccaaatctcaaagttaatatgatgagatataaatacattatgattctagagtg

SEQ ID NO: 123 - DNA, 61510 bp, Arabidopsis thaliana
taaaaacaaattatgtcaagttaaagttaagttggattgtatttgataatagtaaaagattattatttatatataaaaatattgtatatttaagtccacacatagcgtgggatgttttatagaagaatgatgttttagtttttttacataaattaagaaaaacaacttttccattttaatattattattttgttagtttaataatattaactatacttctctcctctttttaattttattggtcacaaacaaaactataatgatgatgatgtagaacatcaatctttgtggaacaagaaaaaaaaacctaaaacagggaatagtatttttgtttctgaattgcttgggctcttcttaattttgatgatgtgtttgaaaaaattcattcaattttttgttctaaaatgtccggtttataatattttacgtcaaaaacatgaataactatatatatttatatatatatatataatgcgtgtaatacaaatttaaaattaaattatatctcgtgcgatgcgcgagtccacatctagtaccatagataaaagtctttagtgatttcaaaaaattataagcaaagtttacatttttatgtataaacatttatattttctttgaatataattaaacataaattttttataaggaaacatgtttagccaactttagaaagaaaaaaatctttgtccacgcagatcagttataagttataactgattccaaattcatggtatgaattttggcttttggcgttacgctagtgtaattaagaatcacgtgttttggtcctaccattctataattctgtttcctacgtacataatatgtttactgtttagccaataacttttaaacatctttgtccccgcatatcaattatatagctgattccaacctatttttaaatttatttttggtatttttcataaagagtttgctttttgttacaacgattgttcctgactttcttactttttttggacggcaagtattgcacccacaaattgtgatatgtttttttctctaaatttgctctaatttattttatatttggcatttcaaacaatgatttgatcaaaaaaaaaaaatcttgtgaaacaaaaagacgatgttttgtattatcatccatgtgccatcctagtcactttgttattgcagttttgtattatcatccatgtgccattctagtcaccttgctcttaacggaacattaacagcgtttggagatttgtgaatttagttttatattatttattattttgtcgtgtataaaatttaaagttaagttataaacgcaataaaaagttttgtgtataaatatgataatgcagtagacactcttaacatgttgttttgttaaaaaacttcaactatattttctttaaaatatcatataagatggattgatcaagtaaattcgttagggagctgtgagacatgacattcaagcatattcattgaagatatcactttattcgttagggagctgttatcatcaaatatcataacgtgacgccttataaagtagagcctattataaattatagaaatcaagtgggtgattgattcgtctacagatcaaatatataataagatttacggacatacaaaattaagataattatcatcaaatggatcaatctagctaatggatctatgtctcacaaagaacctggtgtttcacggtagaaacaagcattttgtattattatctatatgacatgacattctagtcaccttgataatgcaatagacacttaacatcgtttggagatttgtggatttagtcttatattatttattattttgttcgtatataaaattcaaagttaatatttagttataaacacaacacatagttttgtgtatatgataatgcaatagacacttttaacattttttttcttctaaaaaacgacaagtatattttctttaaatcatcatataagatggtatttgatgagaatgagatatttatttaaaatcatcttatatgttttcaactagtgttgagagaaagatttatttattctagatattaaaattttaaaaaataatatctaaaaatattataaagtctatcacttaataaattttatttatttattattttggaggaattttgtttaaaaatatttgagataagaattaaatttgaattcttaattattctttcaactatttctgagataaaaacttttttattttttatattaaaatttaatgaaaaatattgataaatattttcaaactctatcacttaataaagtttttctttttgacgaatttatttttataaatatttaagatataattatttttaaaattgttagttacattatcttaatttatggattttttgttctgatttaagtttataatcattttagttatttttaaattgttttaatgaggttatgagggcattttccaaattaaaactcaaaaatagagtactttccaaaattactcattaattcattcaagagtagttagaatttaaattttataactaaatgaatttttattttattttattatgtaacatattctaatcgaatgaaataaaatagcacgaataaaaagattaatctctagaagtaaacccaaatattcttcaaaaggtatccacgagaatcacactgcaggttgtaaccacaagaatcacactgcaggttgtaaccacgagaatcacactggtgctaacacccaagaaattgagttgtattgaacaatattattgatacttttatagggaaatgatatttaaggattcggttcaactaatacatcactttatgtgtattagttgatataaacaaagactgtaatgtatttaatcattgattgaattttaccaaacaaagatgaccaaattgttttgctttttaaaaacaaattaaaattttccatgtcatctaattaactaaattaaaacaattaatatgaaataaataaataaatttatttaaacccactaaatatatttaattattaaatctaatccctaaccattttttttataaacccaaaccaatatataatcccgtttaacaaaatctaaaccctaattctcttttgtaaacccaaaccaccatttaaactcgtttaatcgtaaaaagtttaaaccctaatcgtactttctaaacccaaaccgacatttaacctcgtgtaattataaaatttaaatttgtttataaacccaaaccgatatttaatcctgtttaatcataaaatctaaacttctaaccctttctaataaacccaaaccgatacataatttcgttttaatagaaaattagattttttaattaaattaaattattattagatggcaaattctaattggctaaaatgaaggggataaatataaaaagtaaaaactaatccatcacaattcttctttatatcaattaaaaggtttgaaaacgatggcaaaaaacaaaaaatggtttacaaacgaatttgttttttttaagacgacttctctgtaatttatttgctgattacttttttttttacgacaaaacaatttcagtggttaaccagagtcattacaaaaatgttgatcgaaccaaacaggtaaggtatcaaaatcagagtaacaagaagaataagtacatccggatttcgctaaagcatgtggtagtttgttaccctctcttctaataaaaccaaactaaatacttgaaaactttactgtccaaaaatggatgtcctcaagtaaattcgttagggagctatgagacataaatccattagctagattgatccatctgatgataattatcttaattttgtatgtccgtagatcttattatatatttgatttatagacgaatcagtcacccacttggtttctataatttataataggttctactgtataaggcgtttcgtcctttgtttgtttttacttaaataaaacatattatagaaatctacttatagtgttgtaagagcatgtccattgcagggaccttgcaagttttttaagaaatttttgtgaataaaagcaaaaaattaaatcagaatggtgtaataaactaaggtgcgaaccttgtttaaggtatttttgggtgtattaggtgcgctgacgtgattgtacattagtggatgacaacaaaacaagttttgtttcttttcccgtgttttttttctttcctcattcccaaactatttttttatttctctcctctctcctctcttgttttctccgaagctcgacttcggcggatcaaattcttcatcgtctcttttcttaacatgtctctcttctcattatcttatcacgatccacaagattcgtgatcgaagaggtgtcgaaaaatccaccggaagagctactcttaccggctttgctgaggtcaacgatgtgacgatgtttttcggtggcttggttagaatgttgatgctcataggatcctgcttgtgggttcgtctgctggtaagattcttatatgcgattgaagttttgattttgttgctcctttgatgcttaattgttgatctcggtttaggttgaatttgattgcaagttaaaatctgatgcttatgatctggtaattgcttcttacaagttgatatgtaacaatgctttcgaattaagtatatggattcgtatacagattctgggctttgctttatgtttaaatttgtgtttgatctgttggtttttaagattaaaaagtgacccttttgttgcttattcacttctcattagcatgacaacggattggtggcacagaataattggttctagggtttatgtttatgctcttttgtttgctcatttagttgatattatgagctgagataactttgttccggtttggtgttggtcatgttaaggtccatgttccttctctcgtgtatctctaagtggttttagttgatgtaattcacgttccatatttgagtatagtgatggtctgataagatgagaatggagtaagaagagtagcataattttggtcgaggttacttggagcagttgcagcaatgggttttggtcgaagttacttggatcgattgcattacttgtataaaagagaccacatgttttacgtcaccacaagtttgtactttggtttgaatgcttgtacaccacaaaattatattccgaacactagttcttattgtgtattctatgacattacttgtatgctaaacaataattttattttcattgttctaaattttgaagtctctgtatatgcataccaaaacactcttcttttatccactcttattgttttaagtatccactcttcttgttctctacaacaaacccaataaacattcttctttcaccaaataaacactcttctttaacctaacacacacacttccttttacccaataaacactctttttcacaaactaataaaaatttctcacttaaggatttcacttaaggattcaaccattggatagtaaaaattataaaagttctacaaaaactctaaacactcatttactcaaaatttactattaaaaattgtaaggagtccttaattaggactccccaatggagatgctctaagatccttgacaaaaaaaaaaaaaaaaaagtgttgtaagttgtaactaatattaattgatttgactcatcaagaaaaaaaatcagttttatttaaactcaccaatcatgtattttgttatttttaatagatactagatcgaaatctgtgctatgttacaggatattgtttttgaatttttttcattgttttatcaaagccagaagcagtaaaattgcaacaaaaataaaaagaaagaggatctgtttaccgtataattacaaatttgtttacttgtttgtatttctcatgtctgataacacaaaaataataaagtttgttacattgactttattttttagggtttatacatgtttttcccaaaaatcctaagtgctttgaaatactcaaaaactgataacactactaactacatcgtccactagagctagagaaattgttggacttcaaaaacaaatcttttgttaatttgaggaaataaaataaaattatttgtctttttgaacaaataaaaaaaaattatttgtttttttgggctaataaaacaaaatcatttgtttattaacaaaatatgaggataaaaatcgacattaatttacacttttgtgaacatatatgtcattttttcctcactttttgttttcaataattaattaactgaatttgaagctaaccaaaaaacgaaattattgatttactttttcaaataaaattgttttatagagaagtgtcagtttttttttttttttgtaggcgaagtgtcagttttgtttaaactaatacatcaagttctttgtttgattacacttaaatataaaaatattagaaaaatctactcatagtgttgattgttaatattaactgatttgactatataaaaaaaaaaaatcatatttgttcaaaactaatccgtcacgtactttgttgttttcaataaatttaaaatatgttaaacaaatcttctcaaagagctgtattattgccgtagtttatatatacatttgattgcgtatatcgacgagagataatgatcaaaaaatattaggtttgtttaaactaatccatcagtactacttttattttcattaaaaagagtttaaatgttggtttgagtttacaaaagaaaattaaagtttacattttgtaattaaacaagattatatatcggttgaaaagtggttagggttaagattttatgattaaataattttttatttattatgtgaaatattctgattggttgagataaaatggggtgaatgaacccctagtattgttctagaagtttaataatattagttctccaaacaaaataatttgaccaatatttcaagttagatttggaaattttcattttgcagaagaaaaaaaaatttggaattttcaatacattttcttttttacgtgtcgatcacttgtcaacaaggaaacttattctgcaaattaaactaacccttaaacttcagcataatgccttaggatttccctccattttccaagaaacagaccatcttataccttttgacagcttctaaagtgtattacgacatgagttgagagtgcgtctaacctcccgctaagatcatcgcacatgttatcttgacatttatgtcgtttgcacccttttcttggttctctataatttgctacataattgtcttaaggcacagtggctgagctctttacagcttggaaaggtgcattaagtaaagttatattaagttacaaacagcagcaatctcagctctcaattaaaacgagtttaaatgtacggtcaggaattaagttatattatattggattattaaagtcctttttcttgtagctgcaaagaaagcaaccggaaaagaaaaaaagaaaaaaaaaaacagagagcgagagagagagagaaatagaaatttggaaatggaggaaaagcaagagaggaggagaaggatcgtgttgattcccgctccagcacaaggacacatatctccgatgatgcaacttgcaagagcccttcacttaaagggcttctccattacagttgctcaaaccaagttcaattacttgaagccttcaaaagacttagctgattttcagtttatcaccatcccagagagcttaccagcctcggatcttaagaatctaggaccagtttggtttcttcttaaactcaataaagagtgtgagtttagcttcaaggagtgtttaggtcaattgttgctgcaaaaacaacttataccggaagaagagatcgcttgtgtcatctacgacgagttcatgtactttgctgaagctgcagccaaagagtttaaccttcccaaagttattttcagtaccgaaaatgcgacggcttttgcttgtcgctctgccatgtgcaaactctatgcaaaagatggtttggctccccttaaaggtatctatctctataagttgaaattgtttctctcacttttgcaaattacatgttaaaatatggtatttgtagaagtctttgtttgttttgtggcatttgcggtttacgattgggaatatattctagggatttttctaattttgtaagatgtgaaattctcttacatcaaaatttgtttgcttattgttggagaatatcaagtataaatgcaaatgcaaaaaaatacatgaggagaaattcattttttcatgactatcatcgtatatgttgatgatacgaatatgagtatcatcaagatacaaaattaagtaggactttgcgtttatgatttgatttatttctttgaaattgagtaaataaattgcggccataattttgcttttaatatatatatattggttttcacttatcacagaaggatgtgggcgagaagaggagctagtgccaaagttgcatccccttagatacaaagacctaccaacttcagcatttgcaccagtagaagcctcagtggaagtgtttaaaagttcatgtgataaagggacagcttccgctatgataatcaacacagtgaggtgtctagagatatcatccttggagtggcttcaacaagaacttaagattccgatatatcctataggccctcttcacatggtttcttcagctcctcctacgagtctactagacgagaatgagagttgcattgattggctgaacaaacaaaagccgagctcggtgatttacataagtttgggaagctttactttgttggaaactaaagaagtgttggaaatggcttcgggcttggttagtagtaaccaacacttcttgtgggtgattcgacccgggtccatacttggttctgaattgactaatgaggaattattgagtatgatggaaataccggatcgaggctacattgtgaaatgggctccacaaaagcaagtgcttgcacattctgcggttggagcattttggagtcattgtggatggaactcgactctagagagcatgggtgaaggagttccgatgatttgtaggccttttactactgatcaaaaggtaaatgcgcggtatgtggagtgtgtctggagagttggggttcaagtggagggtgaactaaagagaggagtagtcgagagagctgtgaagaggttactggtggatgaagaaggagaagagatgaagttgagagctctcagtttgaaagagaaactcaaagtttctgttctaccgggaggttcttcacacagttcactagatgacttaatcaagactctatgaacatttacaaataaaattcgtatatctactcatttcacttctagacatatggccgtttgggtttgcataaattaagtttaaattttacataaaagtcttgaacttctaataatgaatatagaagataaattggatcaacgaacatatagaaaaagggtttacggttcatatatataagagtttctcaccacttggggcacttttcaagattcttagagcaagtgaaacactttgagagtagtatgcactttttaagatttttaagcaaatcaataccattttaccttccatctagttacaaactcttaaatagttggaaaacaaaataatatgttaaattgtggaccgtacgatgcaaacttaaaattaagatatgatggttgtggatggacactggaattcggagtggggtttggttgtaatgagagagaaatgaagatttttgttattgagtagctaggttgcatgaaaactcgttccgatgtccgtttcccgtttccaaacattttagaaacgaaaactttttggaaacatgaaaatcgtcatggaaacgcgtttcctaaaagtctatgtttggaaacacgatggaaactcacgtttccaaaatagaaacttaagtttctgaaatagacatacgacaaatcatttttattggctttgactatttaataaataaaagtggaaatattaagattattaatacatataactaattttggaagactctgagttttaagatatttctcttgataaaccagatttgaagaaaggtttttattatctttgacgaaaactaatgaaaatgagaatgaaaatgttcgtctaaattaaatatttgaacttaaactttttaatctttatcatttaaaattttagttaacttatttaatattgatagtttggacttctattgtttaaaccattttttctttaatataattttatgttaatatcatatatatatatatatattatgtataatttctagttttctgataaatatgagttgttttttaatgaaaagttgatttacaaaagaaaaaacagttttgaatcaattaactttacaaaaaatgtaaaaaggtaaatttaaaaatgaacattgaaaaaatatatattgcataaaattgaaatgacattttatttttgatttacataggacaaccaaaaacattagaccggtcctggattcttcatacatatgactttatcagactccgtgaaattcatttagtatctactcatttcactagcctacgttttcatgctttgttttgcaaattaataaaatcatatattcttgacaaaaaaaaagttagggatgtcaaaaagggtcaagatttataagtcaattcaactcaactcaacacatgaactaataagttgaaaattttgactcaacttatattcaatatatttagaaaaactttaaatcgacaaggaaaaattcacaagttttttcttatctttaatattttgtattgtaaaaaatttggcataaaaaattcatactaaattgttttatattacttttataaacaaattttttttaaattgattcttttaaattctaaataaaatatgattaaaaacaatcaatagagacgaccatacgctgtgatttgtgctccaaaacattttctgcatctgtctccgtaggacaacacgttcttttatggataatatcactatctatacccagaagaatcaaaaattaagaatataccaatgttttctatataattagttctctctctataatttatgtaagttagacaaaaatgcccttattacatatatcaaattatttagtaatgtaataaaatagttatcgatatttttatcatcaatttctttaggaatattatattatgaattagatgattactattagattaacgtgataataatatatatatccatgtaagttaaaaataaattatgttaaaacatatgatatcgcgataagaataatgttaaagaggtatacaattagtaatgtgttaaatttatttttaacatattaaattatacaatatattatataaacttatcaatatattttaatctttcattcattatgacataaaagtacggtaaaaataattgtaacgtactaatgtttcatttagcaaaatctatatatacatttttgcagccattttagcaaataaatcttggacttggacttatttacaatctaatgccattagcattaaatctttttttaaaataattaattttactatcaattttttatttaaattatcaatcaaatttaatcccaacaaacttcaaatcaatcccttaaaattagcataaacatatttgttaacaatattttaaaacaaagttttttgttaaataaatattattcttactaaacgttttttgtttaaataaataaattttgtatttgaacttatttacaatgtcatgtcactgacattaattatttattaatgaaaatatttaagtacagatttaaatcttcaaaatccttgctttatagttattatgtcattaccttataagcaaaaatattaattttttaaatattcttatttatatatttaaaatttaacattattaatatttaaacttataaaaagtttgatatatcacaatttttaacatcattatataatatatagagtttaaaaaaatcttaattttttccgtcataatttatgatttaaaattttaaaaatgaacatatattaaccaattggcaaaaaatgtgtgggttcaacgtcccgcatcgacaaaaatatttagacaatgatttataaacatatcataaataagatcaatattaatataaataaaagttttttttacgggacgggtttgacgggacgggtttggcaggacgttacttaataacaattgtaaactataaaataaaaatatattatagatatatacaatttgcaaaaaagaaaatatactaattttaaaaagataaattgtccccgcggtgtaccgcgggttaaaatttagtatctaacgtaataatatagcaaaaaaaatataatccccttttattgtgctgaatatacataaataaaaaatacagatttattattttaaatcaataaatattttttaataaaaaatttgtaaacttatcgcgatatcatagtttttagcacgttaaacaaatagttatatacttatcatcaatatattacaattatttttattcaatggcatttttataattaatttaaaacaaaaatatattttttgtttaatattatttttccttcatacttacctaaataactaattgttatgcatagattcttaatttcttcatcttctatgcatagatattaatatagcctttcttttactgtactttggtttttcttcttaaaagtttccggcaaatacatcgcctaccaaaaatatttctcaataaatgatgtgatataattgagttttttttttctttgatggagacagttttctgttcttcattattttctttttaagtagacatcaaaattgttcaaagctatatatataatatgaatttcaattttatatctcttttttggtgaaatgaattttaattttatatatataaaaagaatattaatctatttacaaaattagtttaactatctcaagagttctcataaagaaaccagcttaatgtatgaaaatatttaattatacaaactatatatacaagaatgaatttgaaaaatttaagtcactttgattatcagtatttttcctcaagatatggtttgatttagggtcctcttttgtttcctccaactttcaccaaatggttatggtcaaaatttttttattttttttttattttttttttctttttttatatggtcaattttggttatggtcaattttaaaattaggtttgattttggattgaaagtatagttttttgtagttctttaaaaatatttaaactattttgttggagtcagaattcaattatgcgtgggactgcagattggttcactcatttttttttcccagactggtaataatatgaaatttcaataaagcgtagagttatgtgtcgtgtcatttacacgatttgggtatcctttaatgcgatcaatattgtgggcttcttagagacttctatagctaaaaaaatttatatttataaaagagaggaaaaaaaatatgaacaaacgatatcctaacttagctaatgaataggttttgtggctaaaaatgcaaacaattaaaaaatggatttatatctgtaataagggaaaacttcagtttatgctttatgcctaattaaagctattgaatgtgatgcaaaaaaataaaaaaataaaaatagcgactaaatataaatcttttcaatacatgatttgtttttccttttttactaaaaaattagcatttgggtttcctgtcacaaccttctcaaaatcgtaacaatgcaccaatatttaaactaagtattgtttaaggtttctgaacagaaattaaaaaagaaaaagaaaataatttacccttgtttaatgtgttttttttagtgattaagatattaaaattatgagaataaaatttggaaatttttaccaaacatgtacattgaaaatcaaaaacgacaactattagaaaacaaaactttagtactagaatgacaactaaattaaaacgtaggaagtatatcgcgagtaagcagaccttttgacaaaccgcatatttcccaaaaaattaatcacttgggctaaattacataataatctctatgtttgaaaatataggacgtttaagctaattagtacatactttaagaaatttatttttgtttttaaaaactatcatttaaatttaattcaaaaaatttgaaccaatgatataaaagactacacaatataaattaacgactatattaggactggtatattttgcgaccgtttttaacgatcaactaaagtagtcgctaagtagtctcgactaaggtgtttgcgaccatcttgtgacttttattggagttgcaaaatgcttgtttttgtagtattcaatatatttttctgacattttgttttcaatttccaatacttttaacaactaaagcactaatttatacttaaacaaaaatttatgtattttagatcgtgagattaaaattacatggagtagtttatgaatattatatagagaattcaaattggatttttttcttttacaaaatcttgagatcgtgagattaaaattacatagcggtttgtgttgaaaaagggttttttggataaaatctttgtgttttctaacggaattattgactgtcatgtcattacaatacggaaatgttatattgcgggtgacttttgacatgaaggttttttttgcaaaacaaattatatggaaactttttgggcacaaaaccttaaatataagagagacaaggtgaggttaagataagcgctagttagtgtctaaagaaggaaagactaaaattttagggttcaggaatttgttgtgatatcatgtaagaaaatttagatgttcataaaataaatataaaaaccacacacaaacattatatatatatatatcactcaaattacaatcatgagaatacattttcattaaattggctttgtttgttggccaacttttttaagcgaatttgcctttgtttttttttccttaaataaagaagatgtaacaaatgttcctacaaacaaacatgaacttttgccagaccaacaaggaacaaatcaccactgtaattatttcaaaataccaaataagagaaaattaaggaaatgatttattcataatataatgttttttgcttcacttactgtctcctcataggtttgttacttccttgtcaaggaaacgaagaactgaacagttggtttgttgcgcaaagtatcgtaacgctcggcaagatggtatgtatacctctcgaacagacgatccataatggcgtctccaaaatgagcaccaagcattggttcagtaatggatcttatgatgcttgccctctttcgaatgacttcaaatcgacatgattggtccaaattatcatcatcatctttcacttcagtacgaccagttttgtatgaaaagagaagaccaaagattgtctcaaaattgctgattttgaacgagccctcgctttcgataacttccctcacctcactctcgtcaggattgtagaatggcaagttaaaagaatctacatccgattccttcacaataccctgcattcaaaacatttctccaaaatcatattacaacaatttaatttaatcatgcagaactcacacaaatttatgatttcaaaatatatatctaaactaaaacttttaatatgtgaatataatcataactaaaaagatatgattggtccatatttttttgttagcaacattagttaaattcaaattcagatataattatagcttcgatggacaaatctgaatccaaataccctagttcttactactaaagactagaaaacaaagaatagtcataatgtgtttataccgaagctaaccggatcaaccgatagggaattaaaaaaaatatgcgtacctcagaaaccaagtcgaggagggaatcagatatcgacgaccaattttggaaacaatctttagataaaggatccaaagattttctgcccacgaaagtaagagccatacgtccatttggcacagtctcatccgcacgcagtctcagaaacaaagagaaatcattcttgaactgagtcaaataactcttgtacacatttggagggcatggacttctaaggtacacattcttcttgttatcttcaagcccatcaggaactttggaaagccaatgtagacaaagagatgaatgaacaaaatggagagacttgctagggaaaagtcttgagtagaatgagcctgggactcctgagatgaagcatttccctttaacatccatcttcagcaacttgtggaaggcagggaccaacttgaaagtagtgttgaaatcgttgtctgggagatcgttcaaacaacaattgatctctggtaagtttttgcctttttgttggtatgatgtaatgatcgtgttgactatttcggacatgaccaataacgtgttttccccggaagaacatcctaagtcggccacttttatacaaccaggaaaatctgttttcactatcatttcttttacggtttctaccaccaccggttttgcatcagaagcaagacgtttctaagaagccaaaatgccaaaatagagagacaaaaacacacacgtattgatcagaaaattgttaatttaatctactggtatattgatatatatatagattttctttttcttttttcctttttccccggaacttatggttctttttttcagtcaaagagcttatggttcatatgtagcaaaatttagatatgtcatacaaatagtggaggcaatacgtacctgtccctcggaattattagcataactgtgttctccatctcctcccttcatgcttagaacacccatgtttaaagtccctataatacataataatttgacttgattagattatatactaaatcaaacacaaaagtgatgccgaaaaaaaacaaagaccttgtgtgaattatatttttgcaagatgaagtgtgattattagatctatctagaaccatatatatagaccatcataaatctaatcatcattcattttgcaacaaatggcatgtgtgtgactgtgtgagagagtgtgagtgtgggattttccatgattaaaatttatttcattgttttttctcaccttcccaaatttattaatgttaattaagaaaaaaaaagtattattgtacgtgagagtatttgcgataccaacaaaaaaaaagtcaaaattattttgcaatacgtggactgtggaaattaataactattaatgtaattttcttgtcaaaataaccaaaatgaaagaaaacaagtatttattgtttctattcttgtaacttaatattgcaacatgcatgattcatttatgtaatttgttattttatcattaggcgtcgaattcactaaaaaaaaactttcatttatggcatattaatatatactttatactgtatttattatttaggactctaaataacaaaaaaaaaacattttgacttaggaccctagataactatttaaatgacttattatattgttttagggatctacaaaatcttttactctaacaatcctgaaatgttcagtttgacaattcctatccaaaatgaatcaccatgctaattttatagtttaagaaatcatctttgtcgaagacacatagagaaattataataaaatcaggtaaattcgtacattggccctcaccgttttactaatttattttctattgatgttgtagatgatacaattggaacaaactaattaaatctggcagaatcgattggtgacaatgctcagtgactgtggcaatgacgttcaatgaaaatggtgaagaatttcacgacacttagattaggtgaattaatttctttatatatatggacatcaagaagagaacttcttagttcttagagcattttcaatggagggtttttaaatagttcttatgtatataaaagtagattaggaagagagagaaaaaaactcttatctaagagacttgaagatttatataagagtctaatgagacacatgtctcttttatattgatttcatttaaaaaaaaaaaaaattaatcatctaaatatattatattaaaataataatatagaggtatttagaaaaaaaattaagagtcctctattgaggatgctcttagtagctgcccctgcccctattagtatctaatttagattctttgtattaaaatagtagaaaaaaaaaaacaagaaaagagaagttagaattggttcctctttagaaacttcttatacttacaaagaattaccttaatatgattttaatattaaaatttaattatttatttgaaatatattaaaataataatattttatggctggtaaaatattccttttgagtatctaaaggatgaagatgttctaaccaacagtatcatgaaaacaaagattgaaaatgaactttaatcatttaaaattgaaacattatcatcatatgaattttcccgattttgttagtttgttcatgtactagaaaatatgtttagtctaaaatagagtatgaactcattattctgtaaacttgtgatcttgtctgagataattacattattatttaatgttatttttgtatatatcaattaaaatattatcaagaattttgttttccaaattggtcaactgagtttgtgtggattaaaatgttaatgaattaaaaatttgtatgtgtgcagctcgttgtattgagtaaactataagaaatgataacttaaaatcaagaaagtggtagatgtgacgtattgtcagtaaataatctgattttgcatttaacttcatttaagaaaatcttatcatgttttaatctgattatgcatataacttcatttaactattacgagagaagtaatttattctcgttgcaaatatcttgtgatgtagacatccaatttattatatacattaatttttattattacagaagattctaatatattacatatggagctctaaattatcacatgaacttttaatttaccatatacactcataagctatttttctaccgttatttctttctaagaaaaaaacatttataagtgttggttccaatccaaaagtaatagacctttgagctggctaaacattttataaattatttacaaacccaatcaccccttattaactaaatgaaattaacattcatttttttctttgcagaaatttatttcaaaattaaaattctccatattcataattttgaaattaacattcattttaaaattaataaaaataaatcgtgctatttttattatgtatttaatatccagttgtttttacgagaccatttgcatgatcaaatatatgattttaggtagtaaagaaatcagtagtttagtaaaccctttttcaaaaaacgaaactatatatactacaacttatgactggttaacttggagaaacaaaattatacttcaagattttctgggcccacgatttctaaattttgttaacaattttttatcatttttggaagaaaatttcctcatattttgttttgaccgatgaatatataggcaacgtgaaacacgttatcatgtgcatgattaaaccactacgtgaataacgtttcacgttaacattaatgattctttgaaccactacgtaacatctgttacggctgtcagagtctctctctcaccagattggtcaacttagtaggtgtgaataaaaatgttaattaattataagtgtgcagctcgttgtatattttattcagttaatcctgaaacattttagaaaaaacacaaagggtaagatggaaagaaatggcatgatatgatatattttgatttacattttttttttttgtgacagcgtttacaattatattattttgttatatagatgtctaattttttgaaaaaaaaaaaaaagatgtctaatttatcaggtgaacgttaaattctttttaaggagaaatcaggtgaacataaaatttataatttaaattttcaaaattagcacattaaactataattaatttcatattgcaaataaaagaaaaattcaaatcttaaattcaaacctctatttcataaagctgaatggttgtatagaatgtaataaatttttagagtctttccttacaaaatatttttatattgaatatagaatatatattttttagttatacaagactgactcaagagaattatttttattagttttgtttttaatactaaaaataaacaagaaaatattttaaatatatttttgttgttaaatacttgattccgatgaacgatgtatcataataattaaaatgtcatgatattgattatatattatcatatagttgatacatgtgaacatatgatttttgttggtaaatacttgattttgatgaacggtgtatcataataaaatggcatgatattgattatatatcatcatttagaaaagaaagtataagtagtattttactccttgtagaaaatagaaagccaaaataaccaaaaatgaaacaaatttaagtcgtaagaaagagggaccagtcgatctctttgtatcttttctctccatttctcgaccgaacaagtccataagtgtcaagctcaagcatatcatctcaaaacctggacaagactcatggtacaaccaaaaagacacaaaaacaaactttgatgcaacaaagattcgacatgaatacaaatcacgagattaataaaacacaaactatatcacttcttataatgtctttttagtttaagagttgatctgatacttctcctccccactctcttatcctaccctcagccattgcagcctacacaagaatatgtatcagtaacaataggacatattgaagaatcgagtttagacatcacatcattgccttttatattatattattgactcacctctgtgtcccaatttgttctacagatcatccatgttaagactattgtctgaaccacggttcctgtcaacattccgcaccagattccctaacacatcaaagattttcgcattattggtgttttcattcttgtttttttctttttttttacttgaaaaagaagattcaagctttcattaattaccattacaccaaagttaagcttgtagcctagtaacagaccaaatgggattccaaacacgtaataacatactatgttaacgtatgccacaactgcttgccatccagctcccacagccacccctgtgtttattatcattttcatcagattcactaagctagcttcttatataaccaaataaagtcttcatatcaaatactattttttatccaaagaccaaccatgattgtatgaaaacaaattgaactagatttgtttctgtgagataaatagtttgagggtacctgataagacaggttggacattgttgatgacaatagagactgcgagtattggtgtaagatctttaacaacaatgataacttcttcgtctcccacaaataacgatggatatttatctctaaagatgagtagagcaattgatatagcaagtccgatcactgtagatgttatcactgccactagtagtgagaattttgcggttcttggatgttttgctcctaattcattagacactctcacactgtaccattttgagattatgccaaagagaggtttatattatattaatcatagttatgccaaagagaggttttaaaacaaaagttttaccttacggctgcgttcatcccaatagcaatcattgcagtccatcccaaaatgttcatgcttcatttttaatatcgttacaagaccaaaacaaaataattagaggcaatggctatacgattaatcataggagaaacgttttttttttcaatactaactttttgccagcggcttttttcaatcaaaacttcgacctcctgcttttctcatcccggaccaaatcaaaattcaaattgtaaaccttaccattatgaaaattagctgatttcaacatatctctatactgttcaagctttccacttggttcttcagaagagcattaatagatccccaatcacaagactattcaatatcttctactctacattttgcggacttagcaaccgttaacgcctaagtattcaatatcttctactctacattttacggacttagcaaccatttagagatattgtcgaaatcggctaattttcatataggtcaggtttgtaatttgaaaaaaaattagttcgggttgagaaaagcagtagtttggaatttgggttataaaaaaaattaccaactaggcaactcataattcttcattttccaaaccaaacttaaaaacattagaggcagtggctatgatcattgattaatcagagtactttcaggggataccaaatataaattttaattacaaagaatttactatgattaatataggtgtatagtggagtcaacaatgaaaaatgtaccaactaagcaaacaactacaaattcttttgacatttgtatacattaataatttagaatgatattattgaaccaagctcaagtgacccttttctaccgtagtaggtttttcgcccatgattagaggcataaattcaacgataatctttactttttgaaatttattaattgttactaagatacaatattacttttaaagtttatatgtgcttccatgaataactaatgttgaacaagctgtagatacattcaaaacagtcgatttttaatatggtccgtttgggttgagtgtatatatatatgtataactactacatgactaaaaataaaatgtagcaaaaaaaaaatgaaacgaataataataaaacaaagaatcaaaatattaattaatgcagcaaattattttgatagatattatcatattaatgcagcaaaaactgactagctaccagctagggtttcactgctcaagaaccaacgaataacataagtcaactacgcatgagtcacgacaaattacactagtgctaattcctagagatttttttttttctttctgataaatagatcctagagattcttgatgagaattttctaaaatatagaaactgaacaaatcaaacaacaaatcttataaacattattaatttgaaaaaaaaaatactaatagactagaattaccagatggagagagcagctacggagatctcagcattcttcaaatatccagcaaataatatgactgccataagataccatacctccaaacttccaaagtaaaaataaacaataatatgataaaaagttaaccaaattgaacaatgataataacattaacgatagagtcgtatgggtgtggttgtgaccaaccagagcataacagcagaagccaaagataatctgacgaaactccacaaattatgaaaagcttcccatgagaatccagaccaagcttcaccgcatgtaccactaaatatgtacacaagctgcgccacgacaatgaaccaccacgaggcgttgagcacgacggctagacccgccgtgccccactggagcccctcaatgacaaaccacgtgaggagcacgtgtagaacaagtgcaaccgctgatatcgcagccatcaccatgattttgctttgtgattgcaagaacttagccgttgggtaattaacagcgtaagcaaagatctgagggatcatgtagatggaaaatattcccgtggcgctagagatcgccggcgtttgaccgatgaacgcgaggattggagcggcgaagatgtaaagaagcgagagaataaccgcggtcacgtttagtatcacccatgatcgttgcaagtaaacgccaagcattgacaatttccctgctccaaacgcttgtccacatagcgtttctaacgcgcttcccattccaagctaattaatggtcacattcacaattattattacaactcaaaaaaaaaaagtttcttagaatatcttacttataaatatggtttatatggtaataaaaactattataatcttactacaaattgaaaaatcgcacaagatttcgttctttttttttggcgtttgtgcttacattttttttgtttgtgttatacatttactatcatatttatttttgatcttttaaatatctttttttgcaacattttgatttatattattgaaaatgatattttagaactagctcaaaacattttgaatggtttaaaaaaaaaaaacattttgaatgatttagaggtatatctcccaaactaatagtattaaattcagcacatttgaatgataaacgcaaaccaaaaaggtcaacaaggggatattaatttaccatgacaccaaatgagaatccagcgatgaccgagttttcaacggagaccgctgcgagagcgatggtgctgatgtgtccggcgaagacctgagtagcagcgccgagagaatattgggttatagacatgaaaatggctggccctgccaagtaccatagctttttgacctccacgttgaactccttgacgaagccaccaacggtggtgatcggaggaatatcttccacggatgagaaaggaagagcaggtggttcttccgccgcagatagaagggtctccgtaagaattttgtcttcttccatatccacgagatagagacaaagatggaaagattaaagcatgtaaaagactaaagaccaaagagtgagcatcttgggattagtcatacatgaattatatagaaaataatttctgtttaataagttaatttcctaatgttaagaaatattgatgtgttgataaaattgatgcagcgcaagtaaggtttaaaattggtggttcagtttaaaattttaatacgaacacgtcattgggtttaatcgtacacgacaagtatggacttttcatcgttttttttttttgaatgtaggttttacttttggtttattctttcttttatattcatgaaacaaaaatcttaagactaggcccaaaccaaacctaaaccttgactgaacgcttttaacatttttagttaaaacttaaaacataaacaacgaatatagactgtgagagtttgtcttcgagtttcatgaatgagaagagaaggcaagagaagactctcaaagaatcagaaggtttgattcaaagttagaaaacttcaggcccatacgcaagaagcccatctcgtacaagtcgttgaagaggaagcacgcctgcagcattgtttcctttaaaaggtctgtgtcgttttgttctttgtagaagtgttcgaacaaaacatgaaaaacaggggacaaagaatcaaagatgcagagagtagatgagatggaatggcgtgtttggttgaatgtagttaatgagttgtgtatgtacaagctctagtaagagccaactgtatataaggactgattctagtggattccgggacaataagtttcccggcgtgagtagggtttcacactgagacccgaacacgtaaaactctctcttgcactttactttctctgcaatttctcagtttctactctgcttcaagtctttctttctaagtttcttcacacgagtgtaatggagagaaagagaggggtttatggtgataaaggtcgctactttaacacccaaaatctccacaaaatggtatcagagctccaggttaaggaggaaacctctcaagaacctagattcgaaagattcgacgggagaggagattacacactgtggaaaagaaagcttcttgctcagcttgaagttatgggtatctcagatgctctaaaggagaaagaagaaaagaaggaagctgttgagacagaaagggtgaaggtcgtgtcttcaagctcagaaagaagaagagaagaacacaagaaagaccattcacgagaagagaaggagaacaaggccagatctgttatcatacttagtgttgcagacaatatcctaagaagaatcagaacagaggagactgctgcaggtatgataagtgttctagataaactctacttgtctgatccactatcaagtcgtatatctcttaaaaggaagctctttgagtttaagatgagtgaaaacaaggctgtagaagagaatatagaagatttcttcaggatagttgaagatctagaaaagttagatgtttatgtgtctgatgaagacaaagcattcatgttgcttttgtctctccctagaaagcttgaacagcttaagtactctttagattattgcgaggaacccttaactttgggtagagtaatgactgcaatatacaagaaagagcttgaggttgctcaaatagaaagacaaacagaggaagaagagaagcgtttgtctttaagggaaagagaaaggtcagattacagagaagaacaagctaagggaaaagagaaggtcagatctgaggcaagagaaaagaaaggtccatgttggagatgtggacaaaagggacatgtcaagacagagtgcttccaagagaaaaagaacaagtcaaggaagaagtcagttagatatgaagaatcatcagcgcaaagtattgtttctggtgggtctgtgttcatggtttcagaagctgctgctcgagcaagtaaaggaagctctgaagaatggatttgtgacacaggttgtacttctcatatgagctcaagaaaagaatggtttgaggacttggtattttctgaatctggaaatgtgtcaatggcaaatgacactactttacaggttaaagggattggaagtgtgaggatcttgaatgacgatggaacaacagtcttgttgactaacgtcatgtatattccgggcatgtcaaagaatctcatatccttagggacacttgagaacaagggatgctggtttaaatccaagaatgggattttaaaggtcataaagggatgcataacattgatgaaggctgaaaaagttggtacactttacatgctaaagggtaaagcagtaacagcgagacgaagagctgtacaaggaccaaaagaggagactaagatggagcatatcaagcctgctcacatgagtcaaacgagtctcgagattccggtcaagaaagggtgtatcagaaaacagaaaatcggtgaagtgaaagtctgtgaagacagggcacagaaagaagtaaaaagaatcaagtttgattctgaaaagattgtcactgaaatgaagcctaagattgtgcattcaaagatatggagtttcgcatctactccgagaaaaatcaaagaaggattgagaataaaaggcatcactgcaaaagaaacagggaaatcggtttgtgacactattctgttaaagtcatgtacaggaggtgttgatattgcagtgaatctcaagaaaagtttattctcatcaagttttgaagtctcaagagataaagagacaagttctgcatcaaactgcaggaaattggtcataagtcaagatgagaaatttcagagagacatcatttgtgaatgttgtcaagaacatgaatgtgaaaggcgaaagtgtgtctcagaaaagggaattttcagtctacatgacaagaatgagttagtctacaacgaatctgttattcaaggtggagcaagctcaagtgaaaattcacagcaacattcaagtttgaattctcatcaagtcatggcaacgttcatgagatcaagaaaagaagaaatggcaaaagatgggacatatcatcactcaacaagtcatcaagtgagtatgaaacgttctggagttacagtatatgcaccatcaagccaaaggaagccaagtccaagagaaagaaatattatttctgtcggatgttatgatggagaaatctttttcaagatcttgttgcctgaagataaagaggactgcttcataaggaaaaatgcagagtttctagaaggttatttgatcaaagtgttgaatcttaagtttcaggatttagaggatcaaagaagaaaatctgtgagagtaagtctgaaatctctacaagattatgaaaccagtagctttcaagttcaaggtggagcttattcagcaaaaggcagtttcataagtgaaggacaagagtctttaaatacgtcgttgcaaggtagagatgcagcatcagaaaccagtgaagaagaaacggatctgcagggttatctattgacaagaattaatgtcaaaagagaagttcagccaagtaagaaagatgaagaaacaaagttagttggatcagttcagtttatcattgaagatgcaggaaaaacagaaccaactagctttgaggaggaaaagagagatccaagctggtcaaaagttgaagaaatccagtttttgcataatagggatacatgggatctggctgataaactcatgaatcaagaggcaagtatatgcaaagggatctacaagaagaaaccagaattttctggaattggaaaaccaagttttaaagtcaacttgagggttaaaggtcactcaaaagaaaaagtggttctgaagctaatggagatgaagcaaaagacagatttcttacatgaaaattctgagaagaacattcggatgcttcaacctgcagtttatgaagaaaaatcaagaaaagagaaagcatttctcttggagaattttctgtatggtttgaagaatttaccaagatcacagaatcagagaaatgacacactcttgattcaagatggttatatgagaagcaagtacgttttgtgggtatacttcaaggtgtcaaagatggagatacatcaaaacagaggatttgaaagtccaaggctgtctcaggaagcttatgtgataaaggtaataaggttgttcaaggaagatcaatgtgagttcgtttttacttcatcggaaactctatttgagttccaagcactcgaagaagaaaaacaaggagatcaagcggattatatgaagttaatatcatgcttaagtgatgttgatagtgtggtagtcgccatcattggcacaagagttaatattgcttggtttagaggagtggtgtttcgttctaagaaagaacattggaagtcaatgttacggaggatgcgaggcattaaaggaaccacggaatcagttcaagttcaccggaaacaagaagattttgagcttacaagagttaatgactcaaaagttgcagttggtgctgatcaaaaacgagttttgacgtgtcggagtttcacgactgcaggcagctcaataagctgcaaatatatgtttcaagaagtagattttgtgtctacaaagaagggtgaacgcaacagatggactggggcttataagcgagttgtttgggtgagagactttaaggatttgatagaatcaagtctggttttcaagaaacaagaagagtctatgttaagaggatgctacagctcaaagtttgcagcaggatcagttttaaaggtaaactttcaacaatgtgtgttcagttttgcaggaaacacattaaggagagaatctggtctgctgaaagtgggtgtttcatctacaacagaggctgaaaagagggtccaggaaatggacatacaagagacagttttgtcaagagaattgcttgacatggacacaggagggctgaagaaaactaccaagttgggtatgttgtctagtgcagccggtgttgtcaccaaagggttaacaaggagcatgttccaagatggcgggccgatgctcaggtttaccaagaactgaccaaggtcagggtccggggaaggaatccaagaactagaatcatcaactcaaagacaaggtggagttttgtgagagtttgtcttcgagtttcatgaatgagaagagaaggcaagagaagactctcaaggaaatcagaaggtttgattcaaagttagaaaacttcaggcccatacgcaagaagcccatctcctacaagtcgttgaagaggaagcatgcctgcagcattgtttcctttaaaaggtctgtgtcgttttgtcctttgtagaagtgttcgaacaaaacaggaaaaacaggggacaaagaatcaaagatgcagagagtagatgagatggaatggcgtgtttggttgaatgtagttaatgagttgtgtatgtacaagctctagtaagagccaactgtatataaggactgattctagtggattccgggacaataagtttcccggcgtgagtagggtttcacactgagacccgaacacgtaaaactctctcttgcactttactttctctgcaatttctcagtttctactctgcttcaagtctttctttctaagtttcttcacacgagtgtaatggagagaaagagaggggtttatggtgataaaggtcgctactttaacacccaaaatctccacatagactgtataaactacaaggttcattgaatcattaaaactacaaagaaaaatatatttattacgtgctatggatcatgtccaaaccctgggacacgtgtgagcgttttaatagtatagttagtccactagatagcagacaatttattattgaggaataccatacactctacaaatttactaattgtatgaattagtaaatccctagttgtgtaaatttactaatggctaatgctaattttaaaaatatgtatagtgtgtacggtttataaaacttttttagttatttttagaagtttgtgaagtgtgtgttataattatccataaaacttgttttagtattatttttgaaaatttgtaaaatgtatgctataatggtccataaaatttgttttagtactattttagggaatttctcataacaactattttaccctcatctattgtttttttttagaataccaagaagtttatgtctctcagagattcacaccaaactaaatttggaaacaaaaactgttttttaattttgttaagattttcttaaatagttaattagtaaaaacaaattcaaaagtgagaaatggaatttaattaaaagaatattttatttaaaatctatattcaatgtataactctcaaaatcttattatataaagtatggttttcaaaattagtaattcacatgatcattacacttgtcaaatctattgacttaagatttggccatatgtccaataaagttttcctttttaataatttaaaaaagtagtaataagaaaattataaatttaaacagttttaaaatataaaaagataattattaagaaatcatacctatatttccataggagatttagctatgtagcaaacaaaaaatttgtttaacaattaaaaattgtaaaaaataattataaatagaaacagttctaaaaaggaatatatatatatatatatatatatattttcataaaaatagactttacaactaactgtactattctcataattctcaccaaacaaactatttttttagaaacaccaccattgctttaagttcattatattggcaaagcttttctttttttttgtcacaaattatttttaggataatattagtaactaacctttgactcaaaaataattataaaaaaatactcatgactctaaagacttttgaaactaacctttttccgatatgtgaaaattcaaaatgcccctaaaacaaaaaacaaatatacaatctcatattgtaatttggagaaaatacatgaaataaatactaataacacaaaatctaaaaacaaagaaaatcattaatgaaagtttgacgacgaaagagacatccaaaaatatcatttagaaaaatattatgtcatactaaaagaaacatgaatagcatatgattaatatggtagtgatgatggtggtggttgatggttacacatgtggtgataggttgatttttaaaaaattgaatcacataaaaattacattcatttatcatatgtactcgatgtcgtaggatataaagaaggtgaagaaataagagcagttgaagaaagaagagaagagactgattgtttattatttaatttttaatattgactaagatatgatttgatatgatatacatattactttgatatgaaaatttagcagtttctattaagatgaaatgtgtaaaattaaagttttagtttcttatgataaatagacagttaaattgtattgtgaaatgaaatgggtaagattaaaattttgttttacaaaacagatactaataaaaaatatgtttgatttactatttaaaattcaaatagcatctataagacagagtatgtagaattaaaatatagtttattatagtgaaatagatagtgatagtgtgtaggaaaatagactgtttaaaattacaatttgattttaaacaaatttttttaaatattatgaaaagtgtatatattactatttcaaattcatagataaaaaatttatatttatttttcttaaataaataatagtaaaaaaaattaaagtgagaagatggaatttaataaaaataatattttatttaaaatctttattcaatgtataacgtttgcaaaaaaataatataaataatcagtcttatatctatattagaaaataatcagacgataaatttgtatattttggtacagtaaaaataagtgtatagaaataatgaactaactaaaatttctatttatcaagaaaagtaatacataaatcttaatattatatataaatatatatatatatatatatatatatatatatatatagaggtgtcaaaatgggtaacccaactcaactcaactcataatcaaatgagtttaacaaaatgggttgggtcaacccataactcatttaatttgatggtttgagttgttaaatgggttaacccatttaagtaataatttaattaattattattataaaacaataataaataattatcattattaataattattaattcattatcattacggatttacgtttttggcgggaaaattacgggttacattgttggcgggaaaatcacgggtttacgtttttggcgggaaaatcacgggttttcgtttttggcgggaaaatcacgggtttacgtttttggcgggaaaatcacggattttcgtttttggcgggaaaatcacgggttttcgtttttggcggaaaaattacatgtttttcgtttttggcggaaaaatcacgggttttcgtttttggcggaaaaatcacgggttttcgtttttggcgggaaaatcacgggttttcgtttttggcggaaaaatcatgggttttcgtgtttggcgggaaaatcacgggtttacgtttttagtgggaaaatcacgggtttacgtttttggcgagaaaatcacgggttttcgtttttggcgggaaaatcacgggtttacgtttttggcgggaaaatcacggatttttcgttttggcgggaaaatcacggattttcgtttttggcgggaaaatcacgggttttcgtttttggcgggaaaatcacatgtttttcgtttttggcggaaaaatcacgggttttcgtttttggcgggaaaatcactggttttcgtttttagcgggaaaatcacgggtttacgtttttggcgggaaaattacgggttttcacttttggcggaaaaatcatgggttttcgtttttggcgggaaaatcacgggtttacgttttttgcggaaaaatcacggatttatgtttttggcgagaaaatcacgggtttctgttttttggtggaaaaattacgagtttactttttctcaattcatcgtttgtatatttaagaaatttggaaaaatattgattttactagattggtttagatgtgttggttaaacttaaattagcattggtttatagattttagttggtttaattcaattttacaaaacttgatggattaattgggtaaaccattgaaaccattaaccattacaatccaactcattttactcatcaaaccaattgacccaataactcatttgacccatcaactcatttgagtcaaaattttcaattcattagggttcatgggttgagttgagttgacccatgaattttgacccattttgacacccctatatatatatatatatatatatactgtacataatattaatatctaaaagtgtgttaacaaaaaaatatatctaaaagtatagaaataatttctaaaataaaaaaacgttagtcggaatcagattgtaaaaacgttacagttttggagcaacgatgattgagtaatcactaatcacatttttttcaatactagtgaagtaatcgtgtgttttggtatatggcaaaataagacaaattcaaagactaatgggccaattatatgtatttactcgtttaactcgaatggcctgtttggagcccaatcaaccaaaggagagacgattcgaaacttttaaacgatgaatttgtaatcaaacacgaaccctaatattttgggggatttttgttttctgtcaatttgttcatcatgattcaaaagcttttcaatttggtcatggattagaaatagtgtcaatgggtaattggaaaattcgatcttttaggctaattttgggaaatggaggagaagctctcgaggagaagaagagtagtgttggttccagttccagctcaaggacatataactccaatgatacaacttgcaaaagcacttcactcaaaaggcttctctattacagttgttcaaaccaagttcaactacttaaacccttcaaatgatttgtctgattttcagtttgtaaccatcccagagaacttaccagtgtctgatcttaagaatctaggaccaggacggtttctgattaagctagctaatgagtgttatgttagctttaaggatttgttaggtcagttgttggttaatgaagaagaagagatcgcttgtgttatctacgacgagttcatgtactttgttgaagtagcagttaaagagtttaagcttcgtaatgttattttaagtactacaagtgcaacggcttttgtttgtcgctttgttatgtgtgaactctatgctaaagatggtttggctcaacttaaaggtatatataatttctactatcgttttaaaacgccaattcatgtgttttgcgtttaaaaaggattggttttgtacttttgcagaaggcggtgagcgagaagtggagttagtaccggagttgtatcctatacggtacaaagatttaccaagttcggtatttgcatctgtagaatcttcagtggagttgtttaagaatacatgttataaagggacagcttcctctgtgataatcaacacagtgaggtgtctagagatgtcatctttggagtggcttcaacaagaacttgaaatcccggtgtattctataggcccgcttcatatggtggtgtcagctcctcctacgagtcttttagaagagaacgagagctgtatagaatggttgaacaaacaaaagccgagctcggtgatatacataagcttgggaagttttactttgatggaaactaaagaaatgttggagatggcttatgggtttgttagtagtaaccaacacttcttgtgggtgattcgaccgggatctatatgtggttctgaaatctctgaggaagagttgttgaagaagatggtaattacggatcgaggttacattgtgaaatgggcgccgcaaaaacaagtgcttgcacattctgcggttggagcgttctggagtcattgtggatggaactcgactttagaaagtcttggtgaaggagttccattgatatgtaggccttttactactgatcaaaaggggaatgcaaggtacttggagtgtgtgtggaaagtaggaattcaagtggagggtgagctagagagaggcgcaatcgagagagctgtgaagaggttaatggtggatgaagaaggagaagagatgaagagaagagctctaagtttaaaagagaaactcaaagcctctgttttagctcaaggttcttcacataaatcactagatgacttcatcaagactctgtgaaatcatgaattatcaagtagcagtgaaagcagaaacagcggtagtgaaggtagaactgctagcgagagtggaagccgagctagttactaggtcagctatgtatatatgtatatgtattttctagtgaacgaaatagggaatgtggaatcagtgtcttagctttaggagttcagcaatttgcctttagggcatgtaaataaatcttgtgttgttctgttcttttgaaggtcacaccatttctgtcaaactaggtacttcttgaaatcctgtttcgtgtgcgtaatgttatagaagcagaaaataatgcacattttttctcaatcataactaagatagatatcgccgggctgatacaaatggcacattttgagcgtacttttggttttgggattcttatctctaacacaatctgcgaaaaacttgaactacaatcagttctcctgaaaaacagcgatcgtcttataaaccgcgacgggcgtctttgtgattggcacggacgtgattgcggagatccttggataggcaggtataattgcagccacgcattgggcaagaacattgtacgaaaggacactgcttctcatggctagagagctttgtgtatgagatattctttttacacccgtagttggcgtttggacatgacactctagcggcttcaatgactttctccatggctctgcaacgaaattcgtacctaaccggtttttgacaggatgggcaaatgttcttaatttttttccagcacggagtacaagctaggtgaccattaatacactgtagaaatttaagaaccagtgttattatcacaaacaagctaggtgaccattaacttttctttttttatcactcttcttgagcaacaacaactcaaatagaccaattatatattgttctaacctcaattgggcccattatatatttttaacctcggaatgggccgtttatagtatagatccactaagcccacgtcaaagaatcgaacacaaacacgaaccctaacatttggggatttttcgatttgagcaccacgattcactaatttcgttcttgtttccattttgaaaatttgatgaagaagaaatggacaatcacaatgaagaaccaaaaatcgcaccagaacctaatcgttggtacaacattacgttaggaccaacactactcaacaacaatcactcatactctcccaaattctgcactttacgatgtaagtaacaattctcttaatggtatttgtttgttttcgagattcaaatgagaaattcgaaaaatttctggaaatgtttttgtttggtttatgttgaattttgcttgcagatgagtttaaacctgcttcaattgacagtactaaaccaggattgttacataagagtaaagacaataaggttacgttggagtttcaaaacaatcaacttaataaaccaaaagttagatttgatggtgttagtgaggattacaatgacagagataaagatgcaatcctcttctttgatggcgaaaatttccgattggagaagcttcaccgctctgttaagcgtttaaaatgcttacgtgtgcctgatgaatctgcttcagctagtagagtagtaacaaagattgttcctccagttgaaaaaccggtatgaagttttttttcgatctttgcttagttatcgaaacgggttttcgagaagtgttgccgacctttgtgtttgtttctttgttgttgcaggttaagatggcacatattgacattaacaaccctgtagactttgaggaggatgtgaacattgaagatgacaatgaagaagaaactttatcgagaaaggagtttcaaacgggtggccttgacattgacattaaccttccgcatcctgctgaaatggaagatgatgagatagcagttgtagacattaatgatgacgaatcttacaaaggtcttaacgcggcagaagcactcagagcgcaagtaaatgcagaagcgagagaggagtctcgaaagagttcgagttcaggtagcgggagagaaagtgagagtagtgaaagtggagttgagagtagtggtagcggtagtagtagtaccagtgaaagcagaaaaagcggtagtgaaggtggaaccgctagcgagagcggaagccgagatagtctctaggtcagcagtcagctatgtatgtatattatagtgtttgtcattttcatgttaaatcttcttgtcttgtcaataacatagggagatatagtaaaacagtctacaaaagttaactacctcattctggtttgggcggtttacatgatatctttgggagcaaaggctacattgatctcacaggccacggttgcatcagctaaggtcaatcatcgtccaaggagacatcggacatataataaccagattgaagatgtagaggattatatgataagcattaagcacatataattaaaagttttgttagcattgctcaccgtgtaaagactggaacagggtttgtggttggcacggacgtgattgtagagatcatcaagtgagctggtatagttgcagtcacgcattgggcatgaataatgtgcaaaaagacacagatcctcatgcttagagagatttgcgtatgagatagtctctttacacccgtaattggcatttggacatggcactatagctgcttcaatgactttctccatggctctgcaacgaatttctttcccaacccatttttgacaggacgggcaaatgttcttaattttattcctgcacggagtacaagctagatgaccattaatacactataggaagttgaagaaccagtgttattatcacaaccggttgcttagagtatatgattattctagtataaatggattatagcaatagttacactcacagaaaaaaaaagttctgaatttaaaatgctaaaacggcaccgtttagtaaaaaaataaaattatttcttgttttcataacttgtctgcttccatcatctctcccattttatcggagcacgacgatgtctcaagctttactaaattttcagctttcttcttcttctttctcaatccccaaaaccctaattcactctcactctctcaaaaccttgaaaaccccgaaactaaactcacgacaattcttctcacaatgcacagcttcttcttccgatggacccaaaaccttaagaacttgcaaaaactgcaaaacccaattcgatcctctcctcaataacccacgcgcttgtagattccacactgctcatttcggaggtaaaatttgaaaaatcccctctctgatttcggaattaggtttttgaattttggggttcttttgttttaggtgagacaaagaggaaatttgagagtgtatatacaggtggaacaatggatacaccaaattctggaaaagtgttacaatattggcattgttgtggttctgaagatccttttgattctggttgtactgcttctcctcatacaacatatgatgattgattgaagaagaagaaaggaaaagaattttgtgtgtaaaagttacctttatgtattcttttcttgcagataatctttttgtacaaacaacaattttgtgatatgagattcttgttttgttttgtccaaacttgtaactttgcttctcaagtttccgttagttgttgcttcatgttatgtctcttctttgtttattgttcatattctgatattgttgttgctggttgatttttctgacatttggtttctaactttctatatatcattggagtttttcttggcgagagttaggatgggagatcatttagtgttggtggttgatcggttatcaagcgattctggtcttgggacggttaaccgagcagacccgaaagctgactcggttaacgaagatggtgtatctgaatctatatctgcaggagctgatttatgtgagagcaaatttgtacagtgtaggatttgtcatgatgaagatgaagataccaacatggatacgccttgttcttgttctggaacattaaaggttctgtctttaggttgctgttgttttccacaaacagtatcatttctgatttttgattcatattgtcatcaacttttttgcagtttgcacatcataattgcgtccagagatggtgcaatgagaaaggtgatacggtatgcgaaatttgtcgtcaggtataaattctatagcacaatgtaatcatatagtctctgttttgatgaaattgtctcaccaaaccttgttcaaattgcagcaatataaacctggttacacagctccacgacaattgtttcactacacaggcatttctatgaacttcgggtacttttgttcgtcttgctttggtatcctcctttcttcctctgcacaatgtagaaatcttactgagaatcattatctttgttggaaacatcccagtagtgattggggaatcgagggactagatcttcgtaatccttatttcctaacctggggggatgcggatgatgatcatgatctttactcatttcatagccccacaagcttgatttgttgccgtctaattgccttgctagtatgtttcttctctctgtgttcttgagaacatgtatatcgaaaattctgctttgaacacaatgatttgttcatctttcgtgtgcagttcgtccttctgctcttcctgcgccattctcttccagttttactaggtggagtcgatgatttctcgataactttgctcatggtaagctcgataagcaaatgcacaaacatacatatatcctctcttttcctgatttagagaaagaattttgttgttcttttgcagttaccattagtgagaacattaggcatcttgttgattgcttatgtatttttcaagtcattcattgttatacaacgttgcaggcaagagagggtgagaaacaatattctttgaattctaaaatatgatcttgtctttgatattgaaacttaaaacatgtttcgggttatgtgaagctatataacttgttcctttatgctctatttgttcaaaattaggatactagactctctggtttctcgtctgacgaagaaactgcaccgcctcggatattgatggcattgccggaaagacccgagcttcatgttcctgtaaattaagaatcaacattcaatatctcttctccttatatatgttgtttgatttgtatatcatatacacacataactaacccacataataaacgttggtattccaatttaaaaggcaaaagggataaaagagtcctaaaattcacatcttagaaatggagatccttgaacaataacaaccgaggattgtggtcgattcacatgcttccaccagtctcgtaactcttgcactttgttgcataggcctttccattgatacggacaacttggtgcaatcatgacggctacgaaacctagcaaacaagggagaccgaagtatagagccaagtgaggagaaaccgaatagaggaggtggacgaaaatacaaaagccgaacgtgtgacagatgcgtcccacgaagtaagctttagatgctaagacattctcgattgccttaaaccaaaatatgcagctaaataagtttagattttactattaaacgaggttaaatatcagttcgtaatgcttgcattccttcccatagagacagtccaatcatggaagttagataccattggcctacatgtagaccaacgagtagagccaagtagggagaaatacaatagaggagttctaggaagaaaataaagcctatgttgtgactgatgcgtccgaagatgtaggcgagttcacataatgtcacatccctgattgcgccaacccaacaaacgcaacttaataggcgaaaggcaagaacataccggaaattatcaaaatcgttgaataatctttccttacgtgattttcgtggtttctgatagacaagattgcttcaatgttgatgattatcatgacgaagttcatcgcaaagttgtattgtaggttcttgttcatactgcaaccaatataatttaagaggatcagattcagtttaatccatcttatgttacgtaacataacatagtaatgggaaaaaagtaagaaaaatcattgatctagagtctcaccaccaatcacggagaaggctaggagattcatcgaccatagtagaaagaggctttgtagcagcaacattagtattagtcatggcttcttagataattgattggttgctaaagatgcgcaagatataaacttgattatgaggctttgctccgtagttaaaccctaatgcctagagatatataggtctctggacctctggttaacctaatccagtttcatgcctgagatgtttatttagttaatctaacatatcttcttatactaaatttgttttgttgtgtatatctattccaaaaaaataaccattttcttttagaattaggaatatattgtataactttcttaagataatcttatcatacaatttttaatttagaatttgtaactaactctatacgtttcttaagaaatctatcatataaataataataataacaaattgacaatcattttcctttcagctttagtagaaattaaacaaaagttttttcttttagtaaacttttcttttgaaacaaagatggtatactattcttgatgataatcttcttttacatttttattttaaggcttagtaattaattgtacaattttgaaatatactaattttataaatagtaataataatcattttccccctaaacttatattaatcttctaatatatactttttttttctttttcattttctttttagataagcagagaataaataagatatgtctcactagttaacaagtcagttgggattttctctaagaatttatctttttaattaatatttaataataaaaaattcccaaaagattataggagataaaaagagaaacaccattaaaaaaaggagataaaaagagttaaaccatatctgtaactctgacatatgcgttccactaaatatttcaagtacgattcttttgatcaacagcaactgattgtggttgattcacaaacttccaccagtctcgtagttcgcatagaagcagcccagtgatggtactggtagctatgtaccatagccaataaggtagacaaaagtgtagaacgacgaatagagccaagcgggtagagatacaatagaggagatgaaggaaaataacaaagccaatattgttacagatgcgtcccatgacgtaggctccctcacataatgacaaatctgtgattcccaaaatccaaaaaatgcaactcaatatgccaaaaatgaaataaagaggaatgaaaccaatccaagattcagcaacttcgttaaatggaatcttggtgaatttcatatacaagattgctgcaatgttgaggattataatggagctgttcatcgcaatgtcatatcgtacgttcgtcttcatcctgcaaccaacaattaaaacagtttacatatgttatgtttcgttataatattgtcatgtaagaaaaaaaggaaaaatcaatgatatggagtctcaccaccatacacggagggggctaggagattcatggacgattgttgcagtaggcttattagcagacacattagtattagtcatggcttcttcaataatttattggatgctaaagatgcgcaagaaaactttataatgtgggtttgctccattgttaaaccctattgcctatatatataagtctctggatatctgtattgtatgttaacctaatccaatttgttaatatattctaaaagaaaaaggattattcttatagaaggagtttattttataattctattaagataatctcattatacgaattttattttatattagtaataaatactataattgtttaaattaacgatattaattgtattagtcatggcttcagatagaataaaattttactcggtagccgagaaagatagagttgatgttttacgactgcaatatttgtgtagttgatccaccaaaacatgcaaatttgtttagccaaatgcgatgtagggaaaatatatctctaagttaaatgttataagctttgataaattgaaaccataatttttatatataattaatttaagattatataacaattgttattatttatatgtgatgtaatgaccacaataatagctatactttaggtaacctttaaaaaatgaaaccaaaaaattaggaatcatgtatatataaaagtaaggtttcactctttccttattggtccacttggcaatataagttttttttttaaaattcttaataaataataaaaattgaacacacagtttaatataaaactgaaatcataaaaatatgtatcaattatatttttccactctactttattcaacacacaataaattaaaaattaactcccacaatttatttccattctcatatttcatattgttttgtttacttttaagtttttttctttgttgttgttatgagtttaaaaatattattgtaaaagcttaattctaaactttaattttagattatgaaccttacattgttattttgtttaaataatttttttgaatttatatatattaaaataagtttagttcttttaaaaaaatcattattgtgtatatcatattacataaatttgttgtttataatgaataatttgtaaagctctcaaaaaaatatttggaattactttcaattaaagagagcaaattaattttattttaaatataaatttcaatttcattatggaatatggctagcttgaaataagtgttgttttgttgattttgaactcactacatttttttttcttttgttctaatttatatgaattatgtggtgtaaataataattattaataaatataaaattaaatttcaattagcatgtcaatatgagatcatcacatttttactttcaaaataaataatatatactgaagaaatttctacacatttttagcatgtcaagcacaccactatacattaaccgtttacccaaaagtaactgtaactacactcccaatctagagaaaaatatagaaaaaatgtttgtctcatattttgtaaaaagatacattttatttaatcttgataaaatatataattaaacctaaatttaaaatataattaaggatacaatgtatatagataaaagaccgcacatgatggcttctcatatactctcatataaaaaatcttaaaatttaagaaaagataaacttggaaaacataaatattaaatcatttcaatttgtgactcatattaaagaatctaatttttttgcatcaatataataaagtcttttataatgtattatttggtcctaaattgttttttaatgtgtatataacatagattattgtaatttgtattatagggcctttcaataattttgacttataggttttaaaacaattattgaaaaggtcattaaataaatgatagaaaaaattaaacaacctaaattttaaatataattaaggatatagtgtctatatagataaaagactgtacatgatgacttctcaaatactcttatataaaaaaaattaaaatttaatatgtcactcatataaaagaatttagaaaccaattataggtttaacaacaatgattggaaaggtcattaaatgtaagtaatgataaaaaaacaattaaacaatttcctaatatgtgtgaactaatgttgatcatgttttcttcagaaactaagaattgagcttccttatactaaaaatcagaaaaaaaaataagttttgttttacagagcatataagtcaacaaaatttggtaactatttatagcgatattgggtaaatgaatgataattttgatttaaaatttttaaaatataaataaaaggtatatataatttgaatttaatttaattaacaaagataataaatattctagttattttaaggggtaattcaaaatatttaatttggaaagacaaataaatagttctataattattgtggtcatacatgttattatcaatttttgagactaactaaaacacttgcctcaatttttgtattttatgaatgatcaaaactttgattcttgctttctcttgcaattgattctactatccatagtatgctagcttttttttcatatccaaaaaatggtttaaagtgtatttgatgcctaccaaaaaaaacaactaacaaaaatatataagtaagactcaatataaccattttagaaactttaaacaatgtagaatcatttacaaaaacttacaaattgataaggttgagactcttgcccgttttgcttcctctttcatatccatttatggtttaaagtgcatttgatgcctactactacaaaaaaaaaaaaaaagatgcaaaaatttctcgatttacatttagaacaaaacaaaaacatgtaagtaaaactcaatataaccattttagaaacattaaacaatatgaaatcattcacaaaaactaaaagaaaaagaaaaaaaaactgaaagctaatatgttggtgataccgtaaatgttggtgatacagcaagccattttccatttttctttcagtaattgagtaacttcaattgtcaaaggaaacaaaagcacttgtaaatatgtgtgtgttgcgtctgtgtaaatatttgctatttatattagaatagtagattgttagggtataactaataaaggttaataattatagaagaacgtttacaatacgaacattacatgaataacaaactaataattttttttgttttttaaacgttacatgaaacattgagtattcaatctcattgagccactaatgaccttaatgaggtttaattgcatggtgtttaataattggtcatttgagtcttttttaatcaggtgagctttatatctacttctcatttatttcttattaaatcatatttttaaaagcatatgtagtatttaaatattgataagtgatacatcataaaatatatactataattactattcttttatcattgttttgaataaatcacttacaaaataaaataatttggaactattatgtatgagtttatgtcaacaaattattttgtaatttactttatcatacatttattttgtaaaattaagatatgatatgtttattaatatatacatgcataaataacatagaaaaagaaaaactgttaaaatatgagcaaatgtaagatatcaaattttaacagattttttaaaattttaatcatataatattgaaacaaaattattttaattaattattgtttaaaagaactaaaaatggaaaaaaaaatcttataaaattggagaattatttatagttgtgaactattaatgtgcagtctaaaacataataacatgtcaaaatttaaaagatttgattttgtaattagtatagagagttgcaattatgctagaaaaaaatcatttcaaaattgtagtttaatatgtagtaattttatagtttaatgactatttttctaaatatatgatatatctattaataaattattgtagtcaaactacaattaatgataagtacacatgtgatcaaagtagagtgccaaatgtcgcattggtaggcaaagttagaaaaaaccttcttttatataataagatatatatatatagatatatgtatagagttaagcggtgacgttgcctaaaaggctaaaataatgcgtgaagtgacatgtatgttagattctctgtttgatctttctgataaagaaaaggtaagtttctgatgaatcatgtaaacaaaacatattttcattaaagcttcgccaagttttccagtaattgcaaaatgacaaactttttttttaattaggtgtatacaatgtacatatttattcctttatggttattacacactgaaaacgacacacataacattgatgaaagaaaacatgcacttgaccagagaaaagaaaagacttgaccaaaagtaaaatgacttgacataaaaaagaagaagagaacatgactacgtaggtcattatcattcattttcttttaagtacgatatagtataccacttgtttcttccacatcttaaaatcaattgggtgcatggtgagtttcttagccagttgattgaatagctcattgactgcaccatctccaaaatgtttttcgacgattgttgtgagaaaagctcgaaacgtggaagtgataaagtcgttgggttaatggcgtatcgtctaatggatggcttatagtctccatcagctcaattgtgaagcttccattatgttcaatcactcccctcacttcactaaattgaggaaaatacataggcaaactgaataattcgatcttttcctcgcttgttactccctacgatataaaaacaaacagatgattactagtcatttcttatctcttacgcattcatgaaacaattcatgaaacttaacgttatataagacttttgtattatgaaaataaaaataaaaaagttttggattgtatatcttaccaatttagccatatccataagacaatcaccgacggtatcgaacacattaccctgccatgtctcatacatgggcacgccatccggcacattgacctaaaataatcattaatccaccaggcacaagttcttccgctctagcgtcaataaaagcccccatgtcttctatgaactgaactttgtaagccttggtcacatcttctaataaattgttacagtgaatgtaatgtttgttccaggccggagatttcttgtcacatacatatttgggaactttagaaagccaatgagttgtgtaagacgtgtttccgatgtggatgctgtttcttggtaacactcggccatagaaggaccctggaactccaaccgagaaatattcccgttccgtggaaggagactgggttctaaagagtgtgttgaagtcattgttgggttgatcgttgaagaaaacttgaaattcgagaggcaaaaggctattttcgttgttttccttcaagtgtttgtaaagaagtctttcgacactccaagataacttattatatagtaccctttattacatagtacccttttaaacaaagctttatttttataaaattttatttaaattagacagattcgatatgtctaaaaattatggtgttaataaaaataataaaatgaaggtttaacccatataaaagcgacaagtcaataatatttaaaaacataataaatgttaattcaaatctgtcccgtcatataacctgtccagcaatatagtctgtctcatgctactttttcattatatcattatatcattattgtactttttcatgattcttcttcattatatcattattgtatttattttcgtttaagtactatacaatacaccacttgctttttccgcatttcaaaatcaattgggtgattggagagttttttagcaagtcgatagaatagctcatcaaccacaccgtctccaaaatgtttttctatgattgtagtgagaaaagctcgaaacgtggaagtgatgaagtcgttggttaatggcttaccctccaatggatgacttgtggtctccatcagctcaatcgtaaagcttccatttttctcaatctctccctttaattcactaaattgaggaaaatatactggcaaactaaataaatcgatcttttcctcgcttgttattccctaaaaaaaagataactaatgattactaaaaacaatcatgctttttaaatatactaaaaagataattatcttaccgatttagccatatccataagacaatcaccgatggtgtccatcacataaccctgccatgtctcatacaaggacacaccatcaggcaaacattctcctattacaatcattagtcctccagggacaagttcctccgctctagcatcaaggaaaatctccatgtcttttatgaactggaccttgtaagccttggtaacttcttccaacaaattattacattgaatgtaatttttgttccaagccatagatttcttgtcacatacgttatcaggaactttcgagagccagtgagtcgtgtatgaagtgtgtccgatgtggatgctgtttcttggtaacacccgaccatagaaagagcctggaactccgactgagaaatattcgcgttctggagaaagaggttgggttctaaagagtgtgttgaagtcattggtgggttgatcattgaagaaaacttggaactctagtggcacaaggctattttcggtactttcttccaagcgtttggatttcactgtatcaatgatactttgagcaacatggaacgtgttcggtccaatagaacatccaaaatccgcaattctaaaagtaccaaaatcagaacttagttggaggtcgagcttttcaaagatgcatcgtcttgtcttttctacagcgctacttatagctgctttctgtatcatacataataattttagctagttaatatatgtattgcatatacatgttttggctcaaattacaattacaaaaaaaatcgcataacatggtgaaattctagaaaaaaaaaagcatataatcatgtggagtttgtcaaaatggactaatcagacggctgctctgataaatgataatcatcaaaatatatcaaatatacagaattcaacaatatatcataacattacttggtatgaagaattatggatgtaactgtgttgatcgtgaccgctgctcatcgggtacatgtgagaagatgttgacattgcttcgtatttatgacttgtgaacttataaatctcttacaacgttagtttctgtttatatataaagaaagagttgaaaacaaattgcattttttaaaggttggacacagctaagcattcagtaagacaattaatagtgtgtatttgctgaagaatttaaataaattttaattgttatcgggagttttaaaaaatataactgatagtaacacagaagttgaccaaaccaaaagataaaataaaaaatgtaggagcatccctcattgctcacatgggtaacaattgtttaattattttagctcaaaaatttcgtttgttcaatgatattgaaaataatatttgttaatttataggttagagacatcgaagctttcacgtctacgatctggcattgcggcaaaaagagattagatattctggaatttaattttaggatatttttgatgttttggacgcaaaatttacaatagttggtattcaaatttaaatctgattccgtaagaaaatattataattaagtacattgattcaagaattagaaaaataaaaataactgtaaatgaaagattgatataagaatttggaaaattagttctattattttattaaaatatcaattaactgttatatttatttatatactatgttttaggtatttttcgttatatgtggatcaaacaagcaacatattacgaaacttggttggacaccatgaaacttaaaaaacaaactgaaaacgtgataacatgcggcgtcattaattagctgtttaaagcatgatcttttaatgtagtatactatgcatagtaatcgaaactctctcggacacgattattgagacaactcaaaagctaaagtttcccgaatgtttgaagaagatcggcattatgatcccgtctccaaggagcgatggttaccgaaacttctcaaacattttgtctaagcctcttctgattaccaagctctctcaagtgcacattctcagtttcaggggtaattaccaagcatctacaagcttgaagaagatcggcattataaccatacctccaaggagtgatggttaccgaagcttcttcaatatttcttatctcgcagcctcctccgtagagcattgtaccaaaagctcgtatgcgttattagcgcgagctgtttatgaccaccagttggtcgaggatttcgcggagttcatctccatggtcgaatccgctatggtttcaaaagacttttcaaacattgcaagcttctctaagttgagcatctctttagaaaactcatggagcctttatcgttatctttattgccattgtattatttcagttttagtttgtatgaactttcctcttatgaggctttaagtgaatacaaatttgtttgacaaaaaaataaaataaaaacatgatcttttatgatttaataattgacgagaaaagtggtcgaaatgaagacttagtctcaaggacaataaatgttctaaactacctaaggacagatgggcaaaaacaatcaaggatatcaagcaaaattaaagaaatggtcggacatgacaagatgggttgagccatggttaaaccaggttattagaagataacatgattcaagtggttcaggtaatcaggtaactaggtttagcgagccctggtgttgtataagtcaatgtcaagcatggtagaaattgagcaaggcttacgagaagtgatcttagagatatataattgatgcttcatgctaaagtatatcctttataaaaaaatgtctcgagttttagaatccaataaaaacatcaaaactcatatttgattgtttaatcctttagataaaaaccaaaaaaaaaaaacagccattttgttttcttctgagctagattttaatttctgaattcattgcttagctacatattctgcgggatcgcgataccttaaaaggttcagctaatttcatgcacgtgcgtttgcagctattctaattgtgtgtatgtaaggtgaaaacatgaactagcatcaaaggaaaaatttatgatgatttgcaaattaagttagtaaagaagtctttcgacactcctaaatttgctcaatgcccgtcaaacgagagtggggttcaatttccatgggcttgggagccaacagatatatgatgatacaatttgatagtcatgattttacaatgatatcagagccaattctagatagatatagagtgatgtgggctcataccaacataatctttttttttagcctttaagtaagaaataattatgaacgagtcggcataaagaaatgagaacagaagatataaaacagtttaaatcaaccttagaatttaagttatataaagtataaattaacataataaattattttttaggtgacaactttcctcgaggggaacgtagaatcgtggttattaagaccatctccatcactgagaaattcaattttataaaataatataaattttattattatttttattgtttaattttttaattattatttgaaccaatcagaacaaaataaaagtagaaatgagtttcttaaagtttctcacgttgaaaaacgtctctgttctctctcctcctttttctaaattttttattttgttttaatagagagtctctcctctagaaactcccaatagagattctagttctggttatacatagacattagcgaggtggatcttaccgtaactttttaccgtaactttttattgtttacgtgtcgtctcgcaaatatcattctatttttatttttgcatctctctattcttatctaactcgatcgtgatctgttttcacttagattttcactctttttttttttctttttttggtatttttatgtgacggaaatagcatttgtggtggataaagagatgaagctggatcactctttaagtctttgttacaataatttataacgaacaggagaattcatattcaaacggctgctctgataaatgataatcatcaaaatatatcaaatatacaagaagagaattcaacaatatatcataacattacttggtatgaagaattgtggatgtaactgtgttgatcgtgaccgctgctcatggggtacatgtgagaagatgttgacattcctccatatttgtgacttgtgagcttataaatctcttaaaacgttagtttctatttatatataaagaaagagttgaaaacagatttgcatttttcaatgaaataaataaaaatatgaaatgaaatattgaataaaataaaacattgatgtgaaatgtgtggtgtgaagttatgatgtgaagtgtatggtgtatgtaaatatgtatgaaagtttagtcggagaaccaaacggaaatgtttttgagtattatgttttgtatccaagcagctcgactcccacaaccctagatatagaagattttcagttgagctacatgtttggtcccccaccaagttaaggaccatcattctcattacaagaatttgaagaaaacaatatcaaacactcatggaagataagaaatccgaacacaaaaaatccagataggtcgataacacaaatcagtgcagcagaagcaacattatattagcaatcagaaaacgcagcagcccagaactacttcttaagccaaattgataaaaagatattcatcatagacctttctatcaaagaaatcaccaaacgagttttctttctatggtcaagtgacgatttttctttctatggtcaagtgttaccaaaaaatagcatccaaataggacacacttactacacgactcattgctttccaaagttcctgaactcatatatatgtaacaagaaatctctcacttggaacaaaacttacattcattgtaataataaagtaatcaaattttatttctccctttgtagggaaaaacaagcaaggaaaaggttcagttcttcaacttgcctatatattttccgcgatttagggggttgtattcaaattagaattttaagtgatttgagtttttttgagtttttaaataattatgataattttagggaagttcatatgatttttgtaaaatctcattcaaatctcaccttaaaccatgagatttggatttctgtattcttaactaaaaaattcctctcaaatcctccaaaatcattaaaattcaaatccacaaattattttcaataacagtggattttaaggtggatttcgaaatcattagttcaataacactaaatttcatgagactttttaaaatccatgtttgaataacataggatttataaattccgcacaaatcttttaaaatttcacattcaattttggacatagttttgagagcaagtataattggcctacatttcaaaaaatagttgggttcacttttagaggtaaaccatttcattcacctttttcattctagctaatcaaaagaacaattctttctaatgcccttttcacactactccttttcaattctacccttttctatttaccattttcatttataccctatttaaatttttaataaccattttacccctatttgtaaattgatttaggttaacaaaatgaaatattaatatttttcgtctaaaatattttaaaataaaatttctcgccaaaaatttccgaaaaaaaaatttcccgccaaaaattttcgaaaaaagaatttcccgccaaaaaaagttttcgaaaacatttttcccgtaaaaattttttttttggcgggaaatagatttacaagggattttaaaagggttttaaaatattttgaaagatttagggtttaaaagatttacaagagattttaaaagggttttaaaagatttacaagggattttaaagggctttaaaagacttacaagagtttttttaaagatatgtaaatggtttaaaagtgttttaaaatatttacaagagatttttaaagggttttaaaagatgtaaaagagtttttaaaagattttaaaagaaattataagaaaatcctttaaaaactcttgtaaatcttttaaaaaccttttgtaaaggtttagaagagatttaaaatggttcaaaaagagttgtaaatgttttaaatacttacaattttttttctaagagttaaaaaatgcttgtaaagactttataagagttttaaaaggatttacaaaggtttaaaatccttgtaaatgcttttaaaactctttaaaaactcttgtaaatcatgttttacccttttataagcttttaaaatccttgtaaatcattatataccacttacttatcttttaaaaacgattgtaaaccatgcaaaccttttttaaaatctcttgtaaatcattctttgacacttacttatgctttaaaaacgattgtaaatcatgttaaccccttttaaaatcccttgtaaatcattcaatgtcacttacttatgctttaaaacgattgtaaatcatacaaacacttttaaaatcccttgtaaatcattctatgccacttacttatgctttaaaaacgattgtaaatcatgttttacccttttataagcttttaaaatcccttgtaaataattccaataccacttacttatacttaaaaaaacattgtaaaccatgctaaccctttttaaaaatctttgtaaatcattctatgccacttacttatgctttaaaaacgattgtaaatcatgttttacccttttataagcttttcaaatcccttgtaaatcattcaatgccacttacttatgctacaaaacgattgtaaaccatgctaaccctttttaaatcccttataaatcattctatgtcacttacttatgctttaaaacgattgtaaatcatgttttaccctttaataagcttttaacatcccttgtaaatcattcaatgccacttacttatgcttaaaaaacgattgtaaatcttgtaaaactattgtaaaaagttttaaaatgatttacaaaggtttaaaaaggggttttaaagtatttacctatgtttttaaagactttataaatattttaagaggttttaaaatgatttacaagggtttttagcaactaccaaagcttttaaaaaaccttgtaaagttttttaaaagagtttttaaaaaactttacaaggttttttaaaagagtttttaaaaaatttacaaggatttttaaaagcatttttttggctgggaaaaaaaatttacgagaaaaaaatttggcgggaaaattttttttggcgggatttttttttttggtgggaaaaaaagtttggcagaaatgttttttggcgggaaaaataatttttggcgccaaaaatttggcgggaaactatcagtttccaattacatgttcttattagatgagggtaatttggtcattctgttcaagggaagagatatttttaaaaatgaataatataaaagggtattattacaaaaaggtagtaaaaaaaggatagttttgtaaatctgcctaatcaaaatctgctacttactaaaataaaattgaattcatttaagttataaagtttaatccacctcaaaaatgaacttttatatcagttttgagttgacaaaaaagagttagggtttagattttatgattaaacaaagtgaaatctctgtttgagtttataaacatttagattttataattaaacgaggttaaatattggtttaggtttagaaaaaattgttagggtttagattttacattttaacaagtttaagtatcggtttggagtttacaaaggagaagtaaagttagattttgtaattaaacgaaattatatatatcagtttggattaatagaagagtggttggattttacattttatagattttatagttaaatgtttttttattcatttattagctggcatattccgattggctgaaacaaaagagtgaataacattagtagaaatgaaccaaagtattctttgatttcaatttcttttcctttggtctcttctaatgaaaaattgttactactatgaattgaaaattttacttttttaaaattctacttttgttttcactaaatctttatactggtataatattacacattattctaattatatttttactctattcaacagttacacatacaatattgtcaattaattgttaagtgaaaacttttaactaaatctaaatttagcccatgggccttaaaacttaagtattattagttaaaatggcctcgatttcaattccttttatatttccctcttctaattgaggttttaaagctctcccgccaatatagttgaccggtaactaccggttattagccttataccaaccggttaaaaaaaaaccacccaataactggcaaattgaaatcgctctaaccacgaaccgtctctgaatctgaccgaccaccattcttctcgcgccggcgatttcactgtttacagagaaatctcgagaaccctaacctgggtctctctagatttctttgaaatttcgagaatctagggtttcaaactaaaatcgagtccttgagttttcccaatttaaatcgttatgagctctatcaatatcactaacgtcaccgtcttggacaatcctgctccgtttgtgaatccattccagttcgagatttcttacgaatgcttgacctctctcaaagacggtaccttttactttccctgatcctctatctttcgaaaattgatactatgttgatttattttcgattttgttattatattcttcggaaccgattgaagaatgaagaacctgtgattggatatgtgaataatgctacaaaagattcaatttttggggttttaaagtatgatttgtagctaattgacttcactgtgttagggttttcttgcatttgtatgagctcacacacgatctgtctcgagcttagtgtactctctttggcttagaagttggttatatgtctgcaattgttcgtattcaacattgtagttgtggtatttaggagccttgtctttgctctatgaggattgtttactgtgaatggttattttgtatggcttatctttcggatgtgttggctctcaaatgagatttgacctctggctcagtggctatgtactgtaatttcacacattactagttgcaagttatcggttcttgatcatggcagagaattattgttctagatatcattatgtgtgtgttgcttatccttctgcaataaaagcgtaaaaccgttttgcctataccaactggttaagtttctgtgctttgtaaattttcgtgatttctagtcatgatcacattctggtaagcctgatgtgtgagataacgtttctttggttttgctacagatttggaatggaagcttatatacgtagggtcagctgaagacgaaacgtatgatcaagttttggaaagtgttcttgttggtcctgttaacgttgggaactatcgatttgtgttgcaggtagtgtatgattagttttattcttctctctttgtttctggtggtttaggtacataatcttagtctaaactttttgtttgattaaatgataggctgactctccagatccgttaaagattcgtgaggaagatattattggtgttactgtgttattgttgacttgctcatacatggatcaagagtttataagagttggctattatgtgaacaatgactatgatgatgaacagctcagggaagagcctcctaccaaggttttgattgataaggtccaaaggaacatactcacagacaaacctagagtaactaagttccctatcaactttcatcctgagaatgagcagactcttggtgatgggcctgcacctactgaaccatttgctgattctgttgtaaatggagaagctccggtgtttcttgagcagccacaaaagcttcaggagatagaacaatttgatgattctgatgtaaatggagaagctatagcgttgcttgatcagccacaaaatctccaggagacatgattcttgtttgactcaagcttaactggaaactggattagaactatcatctcaattctaatcgaaagatttgtatttttgtttcttttatctggaacttgaactccagttgtgttactgtttgtagaaatttaagttcttcttgcaacatccctatactgtgctatgttcagagttcttagttcccattcttcttgttatcctagtggctaatgcaagcagatcattgcaaacactaacaattcacttgaagatagttgtttaagaaatgcacttattctcaaaattaggtatggcttagtgacccataaaactttcgtttagtccacgtttaaagaatttttcaaaatttaaaggtaagacaatccatttcaacaattttctcacaagcatcacatttaaaaacatggtctatgggtgagttgttcttctgatttattctgtctttcaacttagtttttcttcccaatcagtttccaccaagataatttcactgcacaatcaaagccataatacaatacatagcaaatacatcaaatattaagctacaaacaatcaaatgctttttagtttaatgtttttgaaatcttaacggttattagctaggaaacacttccatcaagaaatttccagtctaacaaaagtatttataaacttttaaggaactagaatatagttgaaaaatgcttaatggtcgacctatattcatccatatgtacactataatacaatgttattatactactattgttgtccatatagaggttcaaagaaaatcactttgtacttagagtcgagctcaaactctccaatgtcgataaaatgctcagtggttagatagtaaagacattgctgcaaaagaaacaaacgaacaagttatctaatcaagcatcacataaactgttttgtctcaagtaaaatcaatcaaaacattaactgaatacctgttgaatctgatctatatcaatcagatctttcattgctggcacattcacattagcagatgtaaacacttgttgatgcactacatcatgtggcacctcgttgtggcgcgtggctttcacggaaaacgtatgcgactggttattttttattcaagtttcatgagcccaaataagtatacatgttccaacttgtaaagttaatttcacaattaactacttttcctctttagggttcttgattaagtagtgaatctagttatattgataatctctaaaatgatagctagttattatttgttacggatcaatcttgatatatatatatggattttaaaggaattttagaatttctgaacccatgaaggcctcaaatatatcaccagtctagatggtctagcgagagcatgacctttcagaaataactgtccacatactaaactttattttctgatagatattatcaaccattcatagttctagaatttttggcaacattaccaaagaattaactctactaggaaaatagacatggaagtttttttcaagaatcataatgtcaagagagtggagagtttcatcatgccaaagtaggttcttgcgcctatcctctgaatggtgaagcattatgatggacatagagattcttagaactaataacactttgacgcatagttgtttgaagattatcttagaattcctttaaaatccaaacatatgatattcttgaatctgaatttggtatagtgatctgatttcactaactagaggacatgcttccagagttccaagtccatttcgccagtcctttaaagagacttctctcttttcttcgagaatccttgcgtttataattataagtaatcacactctgccagaacatcgttagtgtgctcctcctctagacacgcattttaggtctatctcgttttcagagagatagaagtgccttcaactacactccttggaagaaaagtagctcggcagtcaccggcctagtcctctttcttgtcctatgtgatcgtcaccgcttctcttagagttccaatacaactccggaaaatggtctttctaaatagcagattaggcattagatcgtcttgactagaacccataacatttgccccactagtcctgtattaatggcacttcgtctagttacattgacaacattttgaattgagcgtttaaattttatcctcccggagactatcctaatatatcgtactaataagataagatactgactccaagagacggtcgaatgagctaaaaattcaccaagcgtctacaaaaatctagcttggttcaccctgtcaaatcacttgatggctaatattgagtaaacaacgttctcatgataaacaaattccatcgtccaggatctagagaagttcattt

SEQ ID NO: 124 - DNA, 38089 bp, Arabidopsis thaliana
gttttaccgaccaacttggttataactaaagtttgactacctgcggaagtttgtcgatgaagttactagcgttggcgagcttaagtgcggttctaatttcttggtcggacgcatcttttttgccgtaaacaatgttctccctaattgtggtagcaaatagtataggttcttggcttacgagaccaatcttacttctgatccatttcacttgaaatttctttaagtcaattccatctattaaaacttctcctgattccggatcgtagaacctctcaattaaactgatcacagttgattttccgctaccgctctgtcccaccaaagccacggtcatgccattcggtacagtcaacgaaaatccaacaaatatctgcacgtcaggtctagccggatatcgaaagtacacgtctcttagctcaatgtcacctttaatttcttctaaaacctcaccactcatgtcataagcatcgatctttggttttcttttgatagtctcaaacattttgtaagctgcagctgttccggccgcaaaagagttaagagaaggcaatgtctgccccaacgccctacgaagtgaattgcatgtgtaaaaaattagggctatcagtatcacaagatttcttcaaggacaagtaatcgttttactcacattcctccagtcaagattgacgtaatcacgttcatgacttgacctccagtatatcctttctctattatctgcctagcaccgtaccaaatcgcaaaaccataagtacaatataccacaaccatcattatcccaatgcctagaccggagtatagcccttgtttaaccatagatttgtaggctatctcaagcttcttctcatattttcccattgattgtttctccccagtgaaagccacaacctaaataagaaaaagaacatcaaaatattgaaatgtaacatgaatctatgtagttctaaaagaccgcggaactaactgttctaattgacccaacggcttgttgtactacgtttccagcttctgtgtaagccagttgaacacgttgagccttttttgacatgatataggtcattgctccacctgtgcccacgatcagaggaacgcacggaagaagagccaatgtgagtttcattccaactataaaagcaaccgtgaatccaccaacgaatgacgaaacgagctgtgtgaatttcccaacctaaggaaatcaaagccgttaattaaaataagaaaagtttaagcaacttgcgctgcaagaaagatccgatagtgtagaattcattaaaaccttttctcccatggaatcttgaataagaatggtgtctcctgacattcttccgatgacttcaccggtatttgtctcagtatcgaaaaatccaatgtcttgtcttaaaattgtttttaggtatagacggcggattctagtggattgacgctccccagttaccatccagcatgagacctctgcggagaaacgaataagttctttgtaaacaagttagctaggctaaggatgaaaagagaagaaaaacatagtttgtggcttacgcaggaaggacacaacaccggcgtaggctgcaagataaagaaacttcacagcaacctgaaattaattaagaattaaatcgatataaaccgtaacatttgtttcatgcatgcactgactaatgagtataagtaaatatataaatcaaacaaatggaaaacaatttaaagatgaattaacaaaaagaaaattttactattacgttttacaaatttaaaagaacaataatatagaagacaaattttggtgaacctgatgatttacatttaaactaaaacatataaatatattagtgatttcgcatatactacacaaaccaacagtaattaggtgtaggacacctccattggtgggatggaggaatgtatctcaccaaattctattaataaaaagtaataattgaagagaaagagaccctttcttaaattaaccattgaatgacacatgtcatgtaaccattgattaaactattaaaatacaattaagaagaaattataatatttttgtttttttggaaaaattctcatcgtttttaacgatggagctgctttaagcctctaatttcagttaaaatgatatcagtgattaacaactaacaagaatcgtaacattttaccaacagtaaaaactaatttgaagtcctaaccttggagacttctttaaacacgtgatcatgatcagagaaaccaaaaacgttaatgagctgccccatgagtattgacataaacggctgagttaagccgttggccatggcggagagggtcccgatgaccattaaaacgatgtcgtaccgatctgcaaacgtgaaaagcttgtaaaacgctattctctgatttcctcctcctccatttttcttcttcttcgctttctccgccatttgtttctcttgcctctttggttaacctatttattggttaaacagataatttgagtttttttttttaatctgtaaatcgaaaaattttggttatagagggagagtgagatttttcagattcaccctttggactttataaactcagtttcataagttttactacagagattttacatttccatttaaaatttatattattttctataattgtgtatggtagatttcaagaatcttatcaccaacagctgtgattattatttccacattttgatggatttttcatgaatacaacaactttttcctctgcatataaatcaaattatgtttggtagaaaatggtagtactagatactatgtcactatatctattgataatatgttataaaatatgcaaccaaatgtatatctaatttcattaattaattatttttacttaatcctgaaactctttataacgaaatgacatatggcatattaataattcataaagagttatcataagaataaattatgatttaggattatattatgtgtactatatcatataattaattaatatttatcttaaaatattgatacaaacaaatagaaactaaagttaccgtgttataaaacttttataactaaaacttttaagaaaatagtttattattcaaactaaaaccatatatataatacgaatcacatatattttttctaaaaaatttcatctcgcttctatgattaaactacatgaaaaaatatttttaattccacaaatcagatatatactatagcaaaaatgaaataggttatcgtatttaaattttgtaactaaatttgattctgatatagtacgtatcaagttatgtatttacaccgaaaatagtattacttcatgttttttttttgctacaatcagtgtattattacttcatgcatgtttcttacaactgaaaacataaatagtcttaggcatttctaccaaattcttttgataattgtgatgtcatttaattgaaatcaaacaatatatgaatgtttataaccatgaaagagttaaaaacttataaattagttgctttcattaccaagttgtgacagctatcatattacaaatgaatatgtgacatataaatataaacatggtgaagtgaaaaggggtatattaatatctatgcatagaagatgaagaaattaagaatttatgcataactattagttatttaggtaagtatgaaggagaaataatattaaaccaaaaatatccttttcttttaaattaattacaaaaatgccattgaataaaaataattgtaatatattgatgataagtatataactatttgtttaacgtgctaaaaactatgatatcgcgataagtttacaaattctttgttaaaaaatatttatcgatttaaaataataaatctatatttttatttatgtatattcaacacaataaaaggggattagactttttttgctatattattacgttagatactttgctaaatgaaacattagtacgttacaattatttttaccgtacttttatgtcataatgaatgaaagagtaaaatatattgacaagtttatataatatattgtataatttagtatgttaaaaataaatttaacacattactaattgtataccttcttaacattcttcttatcgcgatatcatatgttttaacataatttttttttacttacatgcatatatatattattatcacgttaatctaatagataatcatctaattcataatataatatttttgaagaaattgatgataaaaatatcgataactattttattacattgctaactaatttgatatatgtaataagggcatttttgtctaacttacataaattatagagagaaaactaattatgtagaaaacattagtatattcttaatttttgattcttaatagtgatattatccaagtgaaaatgtcagttttaaatttaatagcattttcatatattaacaaagttaaggttgttgttcacaaaaaaaaaaaaaaaccaaagttaaggttacaaagcattccttatggtcaaaaattacatccaagaggttttcttatagagaaaactctaaaggatctctccttcctcaagatcgtccattctcattgcatcaaatttttctgacccgatcacttccagttccggacaataatcatttttcaaaaccagacccaactcttcaagtaacaaccgagcttttgtcagactaaagcagccacagactttaacgaattttttcttcaatttcgagtggttgttccgttcaaaatcgaagccttttttcatctgtagacatgtttacagatattagaatcatcgttcttcaatatgttaaatcagggttttaaaaaactgcaaaaccggtttataaaattccgcaaaatacctttgctatttcaagccgttgactctcacgtttctgtttcaactcgtcttgtgccctcattcgttcagcaaccttagcagctctcatctcggcttcaattctagctttctctgcatattttgtgaaagaaacgtaagaggcaaacatcgaaaagtttgagactttattttactttcataagaacacgtagtagtgtaccttcacgttgtgctctttccatctgttccttttctatctgtattctaatcagatcagctttgttattctgtcaataaaaaaaaagacatcaatttcagtaaaacatcataagctgtcgaaagtctctgtttaggtaattgggattaagaaagtaatgaaacctggccaaggactattctgtgtttagcttttatgatggttcctgcatattgagctttgagtattgcagcacgaagagctttctcaggaggtaccggcggcagagcaggaaaagccgttttcaactctgtagcaattataaaatggtattaagaaaccaaactatacaaaaaagaggaattctacagattcgattaaactcataagagaggaataataacaacttaccattacccaacagatcactgtttgaaggtttatcaagctgagacttgagactaccatttctctccttctttgaagtgtcagacccttcattgatatagaatttaaaagtaaactgttagaaagaagtgataatagaataacaagtgcgaatgaaactatgaaagatagctttagatttcttaccattagattgaggatctaactcgctcgcttgtgcacctgaaatgttctttaattgacaatcctgtttgacaagagcattgaaacataaatccctattgttagtgacaagactaaaaggaaattaaatttgacagagatcaagaaagaatctgtatataccgttaacgaacaaacgtcacttccaaatgagctacaggacttgaggcatatgcaaattatcctaccacatttacaggttgctaatgctttaggcgtcacagcaggagtattctttttgctctgcactttcactggcttggacgaaagagaacccttttcggagttctctttagctggtttcgtcaatcccaccccagaggaagctgatgttccagtgctgctccgtctagaacaatcacgttcaactggctgtctcttataaccttctctaacttcattccaggataacctcaaaacctttttcttcatgagtgattcccatctaacctcaaaaatctcattaatctcctttgcaatcgtgtgaacctcattccacagaggattataatgcatcgcattggcaaaagttaaccgaacatccgctgcaaactcatcagcattactgtagacattcttcaaaagtttcgatttgacagtgcctaaatccattggcttttgtatgacattgaagtaatcaggaatctccattttaacaggatcaacaggctccttaaagagccatccaccacggtgctccatcaaaaaacgtaacaatgccaaacattgactagaccaatcacaatccagcctctgcttcttcttaggttgaacttcatctagctctttaggcccaccacgcttctttgatttctccgaggattgagataaatcttcagtcactacatgctcaattttcttcgaactatcagacaacgtttggaatgttctgacagaaccttgaggaccaaactttatcttaatattgggtatcgcaaccattcttacaagaacaaataaaaacctgtaagcaaacataaaaagcgactgaaattagggtttatctacgcgacatcacaagactcgaaattagggtttatacgtcaaaacgaacaaatcgacaaaacaatcagatacccaacaaaattccgactaaataccgactaatttcgttacaaatttctaacgatggaagaagatgaagaaggagtgaattagggtttatcaatttcgcgatcgattaacaaaaaaacttgaaaaaggtactttgagaaacgaattcaatgaaatatatagcgaaaagagtattattttacagagataaaagcttaccagaggaagaatcaatggaacagtatgagagattttggagtatcgagtgtgagagtcagagtgaggaggaggaggaagccaaagcggcgatagaagtttcttttttcttattgagggtttgtgtgttaaaaatacttgagataaaacgcgtattttgtggttaaaaacacttatatatttcactattttgaaaatactacttaaaattatctcaaacgatgtcaaaattaaaatatgacaacaaaatctgttgaataaaaagtgatttaataaaaaaaagctttctttaataaattatttcctatttttttttaataatatatacacggatttttttctctttttttctttacaagtagcggtatttctcgtactacttttttaccgttaattttttctcgtatcatattttttatactcactaaatcttaaaactttgcgaacctcatacttgaatttctttttcttctctttttcttataaacctgttttttacgtaccataaaccattgatggtttctaaacatcgacaattttaccttcaaccaatttttttttagatcgttaagatctcttttaatttaccaaaaatgcggattgagaatgaatggtggtcaaaaaaacaactcttttataaaatatcagcaaacaacaactcaatgataggataagcctaagaatactatttataataacatctcgaaaccctaaatttttttaataatatagattatttaattaaaagataattacataagatatttggataatttcgaaatatcatatttttaggttgccaaaataagacctactctttatattagattaggtctaccatcaaattctttttgcaaatagaaacaggaaaattctaacaacttaatattttctttaaaaacttatctcaagccaaaatccaacgatatctatcgatatggtattatcaatcaaaagattaatattgcataaatgttttgataattttgttaacaatagaataagtgtgaaattatgaaattaactggattctaattctatcccttgtaacttgggaagggtgttaagtgttaacacactcggtaaatcactcatggactttgaattttatatttgggcccataatggatcaatcgtaaacccatcaaagaagctcaaaacatctaattttattccatttttggcacctcaaaatatataaacatttatattattgcgaaatttccgatcatggattcgataccacggaagcgacccaaatcggaaaccagaacgggcagaacccctaaatcttcttcttcttcttctccgatcagatcaatgctcgagccaccacaaagcttatttccttccaagggagagttcttcacactattgaaggttttgcttgtcgcttgtgctgtagcttttacctgcaatttcctctctaagtctctgagctcaaacccttctaaatctttctgcgatagtaactttaatcccatcgattcagacttgggtaagctcgaaactcatactcaattcctttatatcatagttgaattatgtaattccttggattaatcaatttcattgtttcagatatttgtgaaccttgtccaattaatggagaatgttaccaagggaagttgcaatgtaatcttggatacaaaaatcaaaggaatttatgtgtagaagatggagaaatcaatgaatcaactaagaaattggtattgaattatgcgaaaaatcggaacttttagatttttttgtcttgttgataatttggtttaaattttggccactgttgttgattcaggttgggtattttgagagaaaagtttgtgaatcatatgctcataatgaatgttatggtacgggaaccatttgggtatgtttctgatatctttaactattgtgttttggtttacttgtgtgttcatactgtggtaatagtgagcattgtgctgagctattttcatcgatgttttaggttccagaaaatgatgtttggacagaactacgtagtaacagtttcttgagtaacttagacgagtctgcttacaattttttgaaaggaaaggctgttgaaggtgtcaccgagctactagagaaaaggactaattctaatgggttagtattttcatcactggttaattagtctattggttactaactattgattaaagattcgtacgttattttttatttatttgaaggattgacgagttgaagtgccctgaatccgtagccaaaagttacaaacctttgacctgtcgcttgcatcaatggatcttgcggcatatcttaatcatctcgtcgtcctgtgcaatggtattgtaatcttagaaaaaagccagtcttttgagtggcttagtttacttgatcaacatcttcaagcttgtttacagtgttgagatgtacagctagtgggcagcgcaatgttgcgtaggagaattcaacgtaagcaatgtttttcaagaagagtggaagagttatacgaccaggtacctctttatccgcacagcatctcgattagtcaactatccttgtcatttttgtaaaaatatataacggggttttattttgaattgattcataaggtctgtgacttcctggaagagaatgcagtggcatcaaattctgcagaaactagtaactgcgagccttgggttattgcatcttggttacgtgattatctactcttgcctagggaaagaagagaccctctgttatggactaaggtatgctgtttttggtctctgtctctgatgcttaatctggctttctctaacaatttgttacaggtgtcatgtttttataaccaattctcaattttgttgcctgacatggttcatggttctttatattcttggttaatttacaggttgaggagttaataaaagaggattcacgtatagaccgatatgaaaaactcctcaaaggtgaaaaaaaagttgtatgggaatggcaaggtatgaacctggaatagttctttatcctctttcactcttcgatttctatatttacatccattgaatgttatttcctcattcagtggaaggttcacttagtttatccaagttgaagaaacagagagagacgcagaagaaagtcagaaaaagtatcgactcaagcacaagcttgcaagagtattacaacagacgaattgccggttagaagctgaaaaccttttgttaattgagtatttctattgagtcaaatagacattcttttaagattgatctttatctggttttgttgcagagacaagttcttagtacatgtacagaagaacattatagaagcttgctatgattcttcacgtaatgtcagaagatccaaggaatgaagcattgtcgatttttccatgttttttttttatgttgatgatgatgcttgaatttgtaatatatgaagattttgtccatgtcctgaccaagttatggaggaaaaagggtgtttgaggagatcaagttctgacattaggaattgaatcctttcatggagaatgattgaatgttgcataccacatcatgaagatgtaggggtatgcatcaatggaattttgtactagctatcaatagttgtatagagacttaaataatagtttgctttgacgttaaagtcatataaactttgtttggagtgataaaagacaatgtaaattaggtttagttcattatgatgacgctacattgatgaaataactaataagtcaaagaattgagttgtggattctagacgatctccaaatgtattgccttcatggagaagcaataacatgcttcgaaattggtcgcacactgtctgtttcaggactttcgtcgaatagtttcatgtaattcccacaactccaaaatcttgaatctttagagaaaccctaaacacgatcttatggggattgaatctattctccacgaaacagagatttggaagccgaagacgaatagattcaatatagactgtcacaaaaccaacaagaacgaacatttggactctcgtggaaccaaataaacaaagatggagattcaaatttcaggaataaacgaaaaaccaacattcttgaattgatgcaatttacccttgaatcgtttctgagttgttggtttatttagcgaaccagtttaaaccggaacccgttcgatttatttttagtgtttaaatataattgacttataggttatgtcaccaattcgataagctcccaagtggttgtgtcatctaactagtttaacatgccaccttggttcgaatgggtgtaccttcgtcagcagtgatactgggacgttgcttatataaaaagctataatggtagggtcgttgtttagcgttctaccatctagcttgaggtaatctaaattaccttatttttttgcttttaattcatttaaaaatcctaatctcatgagatctatgttaacaattggatcggggcttagcatacaattgatataaacttgaacacatctatacgggaaacagtttttacatgattttggtagtagtctatttcaagagatcatctaaaaaagaatcttcaaccacaagttacatagagagatcattttaaacaacgtcaatttatatgaatcctcacgcattaagtgacacctgcacgtcagtcacacgaacatgtccaactctgttcattaggtctttcatcatgtgacactcttgcatatctgaaaacttttattagtgaatacgatttagatcggtaatttcttttgaacaagatgaaggatttttgggtctttgaattgaacgaacattggactcttgtggagcgtaagatagggcatcatgtattttttgttctccaaaataatattttgtttaatagaaatcatctatatattaaaacactaaaccaaagagatataatctctcgtaagattatatgattttggtagtaatctctctttcaagagatcataaaaaaatatcttgtaaacactaaaccaaagagatataatctctagtaagttaatatgattttggtagtaatctctctttcaagagatcataaaaaaagatcttttacaagatacattccgcatcgaacaacattttctatacgtggtttcacgcacaaaggtcgctcactagctggagtaatgtggtttggcaaaattatgtcagtgagcaacttcaccaggagaccatataactgcattaccatttcctcaaagcccctatcccaaaaatagctgtaaattaacacggtggagtaaatatgttgggacaaatattgcatgaaaccaaaaaaattcataatttaccataaaaattcttttaaaaaaaatctgagaccttaattttttcgacaatccaaacacaacagagacagaagtaatgttttagtatgggcatttttgttgttagcaacgctttgtcatgtaaacttttgctacaatgatcttcatggatgtgtgaaacagaggctgatttggtaaacctttttcaggtatcccacgcctcttcaatgagccaaatttatgttttcacacaatggtgagtcttagttttccattcctaatgagtataactctcttatgttcattgatctgatactttttctattatgatgtattgatgttcaaagataatcccacaatgtcttcattaccaaagctgatatttctttggacgtgagaaataaaagatcgccgacatttctactgaacacgcttcttgcagatcttattcagtaccggtaaattctgttgtgtagttctctagagaatagtaattttcttgaccatgcatctaatgagaataaggagtttaggttaatactaatatcattgtgtatatacttgtctcttctattggggaagcaggtgagaccttacattttagatcttggcagcaccaacaaggcctacattagtgagagtgttgaattgcatctcttcttaattgttttgttttcgtggtttagataaaacgtacgttagtagtgacctttgtttttcttttttcagaaaatacatattgaaccacaacgctactatgaactttttgagaaacaggattataattaagataaaagaattaaaaaagtgtgaaggaattaaaattttaatttcaatgaaaataaggggccaagttgaaatatatagaatatacaaaaaagaaattgtacaactattttccttttgtatgaaaataaattagttttttcttttagcaaaaaattagttcatgtatttgcattgcatcaactaaaatagttatattaaaaaaaggatttttgtgtagctgtgatatttggaatagaaaatccagaataataatatcgaaaattgtttgctttatccccctttcttttgtagaaattctcatatgattagtggatgattcggtccaagtactatcatttaaggatctgtgtagtattaaaatctcgaaatctctattcgttattaactttgtcggtgaaggggttgatatataataaaccgaagactttttgtgtgaaaagaatcatgtaataacggtacttattcattttgtacttatactaaaataaataccgattatgttggtggtagacttctaaattttaattagctttttaaaaagacccttaatttttaataaaattgatggaaagaggaatagttactttctatcttcggtaaaattcaggacccaagaaggtcgaggcacgtgccccatgatagacttgtcatgtgatgtgacctattttctttgtccaacaattttttaaaacaaattgtcataggctagaagtcgtcaaaagttaataagcaaaaaacgcaatatttcaaaaataaaaaatttaacaagaatgaatgacacaaacctaatcgtcttgacattttatctcatatatcaataatgctcaatcgagtgtaaatactttttttacatagtaaaaggcgaataagagagcagatcatgtagcaattattttcactattattgttattgtgttgttgactttgatttttagtttttaatagcagggtacaaatttgtaccttcaattatgtcaccaacgagtgtttgagataagattagacaatagtaaacacaaaattgatgtaagctatttaacatgtttattgaactgtaaataattatatctgttttaatatattttttaactattttttttcttaattgatattttattgtattaacactccttcttattaactttgcaaaataaactgtcatcttgtaaattattaccaaatcttaacactattattattgactttagaatctaagatatacctaaataatttcttaaggccaaaaaaaaaattatcatctttttatttaagttaatctaagatataaacattaagagaaagttgcaaaattaaagaaaaaatatctatctttacctggatacaaaacttatacttttggataattcatatgaaagtctctcttctaatgtagtaaaaacttctacatttcacagctaaaaactgaaacccaaatttaaaatttcgtgtatagtaccgaggaaaaaaagtatttgcaagcaaaatctagagcagaaaaatttaaagatcttttgcttcacatgactctattgtttttttcttacctctattttttcaagtctgcagctttttgaagctatatttttcagatctttcactctctctctagctacttctttttgtctttaagttttcaaattttattaaatttttatattctactgcctcctcagcttctctcacaaagcacaaatccaagccccaaatcaaatcccaccattgttttattacctcaatccaagaacactagacacaacaaaaatctctgtttcttatccaaatttctgatctttgtggagaacaatattttgattggatgtgagacaaatgggttgtttacattccaaaactgctaatcttccttcttctgatgatccatcagctccaaacaaaccagaatcaggtaataatactaatctcttagattctaaaaaactcacattttgtttgctcacttagtaaatctgcagtttttcgtctgttcttgttatgggtttgctttaatttgtggggttagggtttgtgaaaggcttaaagcagagaaaaagttataaagtctcttcctttttggaattaaactcttgtttagattgatttgccttttcggggtatgttttgttatgtggttacagtaaatggggaccaagtggatcaggaaatccaaaatttcaaagaatttgaactaaatgagttgaggaaagctaccaatgggtttagtcctagctgcattgtctctgaaggtggagagaaagctcctaatgtcgtttacagagggaagcttgaagggaatcatcttgtagctatcaagcgattctctaggcaatcttggcctgatgctcaacagtttgtggtaagatatctgagaaaaggtcaatgcatgatttgttgttcattgattcattgtctgattttagaccctgggtgattctgttggactatctcttaggcaaaccgcatcaatgactagtccaaggaatggtgatttaggtgtagtttttagttacagaagaagaacaaggcatcatttttcgataaaagaataagcgtccctgagtttggttaccactgaattgtagaaaagtcgataacttcgggtttaaagctgcttttaaatcttaggatacgactaatgtcttgactgtatatcttgactgcttttaaataggagctttgtcctggtgttgaccttgtttgacttgtgaaatcaggtggaagcgactggtgttgggaagcttagaaacaagagaatagttagtttgatcggttgctgtgctgaaggagatgagaggttgttggtggcagagtatatgcccaatgatactctctcaaagcatctcttccactgtaatagtcttatctttctctcgttataagcttggtttaaagtcttctttagatgatttactctcttctttctgtgtttgtttgcattgtttgcaggggaaaagcagccacttccatgggatatgcgtgttcgaatcgcagactatattgcagaagcacttgattactgcaatattgagaaccgaaaaatctatcatgacctcaatgcatacagaatcctcttcgacgaggaaggtgatcctcgtctatctacttttggtcttatgaagaacagtagagatggcaaaagctatagcacaaacttagcttatactccacctgagtttttacggacaggtaaaattcttgatcttgtgaatcgtagtcgaagacaaaccaattcattattgaagattaaagttctctggtttttcttttgcaggtagagtcattcctgaaagtgtgatattcagttatggaactattcttttagatcttttaagcggcaaacacattccacctagccatgtatgtgcttccaatgttctaatttccttcattttatcttacttttttgtcaattgccgaggattttatttgtggtcttcttatctgaattggtggtgatgtttcatatcaggcccttgatatcataagagggaaaaatgctttgcttcttatggattcatctcttgaagggcaatatgcgaatgatgatgcgactaaattagttgatcttgcttcaaaatgccttcaatcagaggcaaaggatcgaccagataccaaatttcttctctctgcagtagcaccactacaaaagcaagaagaggtttaaaagaatccctcctgaaaccgaccatatcatgaatttcatatccaaatttgtttatcctggatttgattttgttgcttaggttgcttctcatgtcttaatgggcttaccaaagaacacagtaatattaccaactatgctttctcctcttggaaaggcctgtgcaaagatggaccttgcgacatttcacgacattttgcttaaaaccggttacagagatgaagaaggtgcagaaaatgagctttcatttcaagaatggacacaacaagtgcaggagatgcttaacacaaaaaagttcggggacattgctttcagagacaaggatttcaagaactcaattgaatactactccaaggtgagaggaaatagcaacaaatccataattctcggtgttcgaaaagaatttctaacctctgtatctatggtttccagttggtggggatgatgccggttccttctgcaacagttttcgctagacgggctttctcctacttaatgacagaccaacaggagcttgcactgagagatgcaatgcaggcacaggtgtgcataccagaatggccaacagctttttacttgcaggctttagcgctctcaaagctcggaatggagactgatgctcaagatatgctcaacgatggcgctgcatatgatgctaagcgacagaatagctggcgctgctaagctattagaggaagtcccaaatatttatgggtcttttcagactgtaactgaaaggtgtgtatgcatgtaagagagagatggaatgtgttgtttacttttgtgaaatgagagcttctttttttgcatgaatctttatgaaaagtcaaatcttttggggaaagagagaataagactgcaaataactaatttgattccttcttccttatggtaatacaaaaagatggaaaattcaatatgctattacaattataaacaactttactgggaaaaataatgttgctttttagtttaggataacagatgatgatacttcatgcttgagaagtaactaaaggtggaaactttgattccaaccatgacaccaaatcctcctttgtagccacaaagatacctggcctatcgctctgtctaaatggtgcagagagttgttgcaaatgcaaggcgaaagagtttgctaatccctgtgagaatctgtgagttcctgtcccagtttgcgccaaaaacagctcaggaagttcctcttggcgtttaatgatgttggcaagtgttctcatccactcttcgagagcggtctcagctgcaccaactgataatgacctcacatctaggctccattcttttatggtcttgttgtgtagtcccgggtatagaccaaaaagtgttcctaagtagagaagctcatgagctctctcatgccggttgttgcctctgcatatatctatcaaacagttgcagaagggccttcttgcctctacttgggttgcattgatcactaacttgaactcttcttttacagtctcatattcggttttctcatctacaatcagattcacaaatgtcaccaacttcttattagctcgctccaaacaagccataaccttttcagcatcttcactactctcacacaaggccataactgaaagcagacacccacagagcctatcgtcaggcttaactccccttttaatcgagagatcaaacacataaaccacatcatcaatccttttagctttccctaagcattgtactaaacaagtgcatcccattacattaacctgaaccccagctttcaacatctcttcaaacaactccatcgccttttcggcttttccaccactcccatatatattcagcattgctgtgtaactaaaattatcaggtctacattgcacagactccttcatatcattaaacagcctctctgcttcttcctccaatccaatatcagcacacatattcaacaacgtattgtacaaaatgaaatccatcggccacttctttgccttcatttcctcccacaactgaagagcatctctcgcccacctcgcttttccataaatctttacaagagctgtcaaagttttctcatttggagttaaacctgcctcaagcatctcattaaacaaactcctcgccaaacccggtttccctgctctccccatagcttccaacaaagtattatacacaacaacattaggcttcacatccatagatttcatctcttgcaaaacatacctaatcccatcataatctccagcttcaccaaacattttccccaacacagagaacgctatagcatcaggtttccaacccgtagccaccgctctttcgtacaaactaagaacctcctcaacttttcctgacttggaataaacatcaagaattgctgagtaagtgacctcatcaggcatcagacctgttttatacattctctcaaaccactcaatagctttgttgtaaagattgcaccttttagcacaagtgatgattgtcgaataagtaatgttatcaagctcaacaccatccttcaccatttcaagtgccatctcctcaataagctgaaattgcctcccaaatctcagagacttcattgtaacattgtaaaatatagtttccataggaaacagactcttggatttaacccaattaaagaaagtatgagtcttttgccattctcttaagctgtttagcacaagcaatgcgttatctctattgggtggatgaggaatctcatcgagaagagataaaaactcagacttttcagtgaaaatagaactattgagcttcagagcaaaagccctaagatccttgatttgaggattgtaagagtaagcagaacgcttttgtctctgaagtgaaagaactgaccttttgggtcttgttggattgacccagacagatttcggtttagacaagatttgagtttgctcttgtctgagtgttgttgcagagagaggcttgagttgctcagagagagatggggtttttgtggtgattggttcttcttctagggttttaggttgtttcaaggaactgcaagaaatgttaagctttctggaacgagattgtctgaaaagagaaggctttaagaatagactgtgtttctttgtgtctgaattttggggattgaagcagacatcaatggctgtggtaagaacagtcgccattagaaacgcagagtgagaggttttagcgtgaagatggtttatcagaacatcttatcttgattttgaaatgacgctcaaaactaaaaagtaatattaggttatgggcttcatggggcctataaagattggcccatatatacctgcggatggcacatcataaagtttgtgtagtgtagacgtgtagttctttggtcacgatgaaattaattcaatctattttagttttcctcaactttagttaaactttgtttgattacaaaatcaaatcatctccgcatctatatatacaaaatcaatacattttccgcatgtgtttccgacttgtactcttgtagttttgaaagagacacaaatgactcgatcgagtcgtaaactgttataatatatagtaacgtagaatatatatcaaatgaacaattattagtagcattttttgtaaactttttatgattccagttagctctgctaaattaatagacatgtgtatataggatgcatatatatatataagtatttgtttctcaaatgataatataaaagttattccaaacataattcagatttctgttaaattctgtttgactcaaaaaaattcatacaaatattgttctattttttacttttcgtgtattgtcttctttgagatgttcacactttatgataatgacacccaattatatacacataattgacattgtgaacaactacaaaacaaatcctgccaacgtactagtcaaataaagaaaatcgtaactaatgtttggtcaaatcactaatagatttttcaaatgatatgttttgtttttgtcattacagtttcatataagatagacactatcaaacaaatcctctaaattcacattaaaaagtgtacatccactcatataggaacgttcaagtctacataaaataaatatggatataagcctgatttataacaaaactacactatttttttttttatagttttggcatccttgtatgatacatcaaaataatcttccgtttctcaaaacgttgatagttggttataaaacttgaagagaccaaaaaaaataaaaagatgaaacaaaaaaataaagaagcaaataaagtaaagaaagaaaagaagggagccgaaagcaaaaggaagaaaaaggtgaggagacaaagtgtgattaagtgataagatgagtcctctccttttccaacgttcatggcttctctttgacaccaatttcaccatcttcctttgtcaagcttccaatttctgaatttagttaatttcaaattctccacaagtttaacgttcaaaattattatatttcataaactagaactatgactagaagtctaggactacttgttggatatgtgtctttgatcatacgtttgaagagggtttggatctcaaatctcgaaccaaaccaccaaaaacggtattaaagtaaattattaaaaaattaaacaagttatagtggtttactttcaatgtaagatttacgtctattttgtgtgttacagtaaattttactataataataaaaaaaaattgggaagactataagcattttatctctcttttcgctttctcattcacatataatgtaaaacaacggcataaatttaaataaggaacacaagccgatcaatgtgccgtccgaacatcgcatcacatattggggtccaagagattaggttcctcaacttaacttgatattttattttctaccatcataatataattgcttttattcatttgttaattatctaacaatgattaacaactttccattatctttaaacccaaactaggtataatataactgtacttacaaaaaagcattttttatgaagagtatcatctgaaaatttataaaaccatatacatcttaattagtatcttttcgttatctataaattttacatgcatatttaaatcttaattacgatacggtaacaaatttaataatacaaactgttatattacaaatcgcccccatgtcgaacatggctccttgtggttcaagatcatccataagtttttcaagatcatccataagttcttccatctcccgaaagtttccttagagacaaatttaataatacaaacagttatattacaaatttttaatctgtctatcacattgttatctgacttttatttatcatcaaaatgatgatgtagtttatacaaagagatccatatatccgtatattaaaaactgaactcacattattgggatatagaaaacccgtataaagaaccgaagatcgacggtcaagaggataagacgaaaatatgacaaaaatatattgttaatattgaagtttagaatatttagcattatttctaaatatattatgtatatttatatttatcttagattatgaaacttagatcaatctcatctctatataaaagaatgcatcttgtacaattattcttatgagaatttattataattaatcctagacatatttgtgttctttactcttatcaatttatcattgcatcagaaccagcttagaaattaagattgaaagctctgatactataataaagttacataaatttctaacccaaaaccaattggcaataagtacagcgacttatgtctcttatatattactcaatgtctcattacatgcttcctaaacattatagatcttaatcttatgacctaataatccctaccttaatctctaacacacattatacatgttacgagatatttacgattcagacgagatatttagaattttaattactgtatcaacgtatgaatattaatttattggctaactacttactagaccaaaaacgctttcaccacgtaaggacaatattatttacaaaactaatataggtatccgtgtaagggtggtcattgatagatccgtttattcgtataggcaaactttttcgagtatattttcctctacatatgcttttagtttttttttttttttggggttaattctcttttccgatcgtattcccgctgacgataccatgggttaaagtgaacgtacgtaaagtagtgtgggaatattctcactctaccaaaataataaggtaacactttcatagaacgagaacctatgttaccgtcaactcaagtaactattttgagctttttgccacttggatttctcaattacgaacaaaatcaaaccaacaaaaatgattttacagattaatacataataacgcttcagtatcttttttctttgacaacatgcattatctgagtttaaatttggttagtactacatcgataatttacaagtacctatgctaatagtcaaaattcaaattaaaaatctaatatccgaataaatggaaatcacgtatatataaccaattacaaatagtttataaaaattcaacctttcgtgaatgattttgctatgtatagactaaaaccgtgtcaaaccaaatatattagttggcctactgttccaccaatatggatgtcgggacataccataccatccctttctacatttggtatgttttcacatttcttttcatgggaagactaagaactggattacattttatttttaatataaattagatattttatgacctctaagtaatagttgaaacctggattctatcgaggatgatcgatctttcttttctattatattttttgttacaatttttggttttacttcttaaaagaaatgacttacaaaaacagagcatcaaactttcgggtttggcaactctggtttttagcaattaaaacaacaaaattaccgagtgaaagagtctcaaaaccacgaaaagaaatgtctcgcagagtaattgttgcgtattactcggtcaacttgtttcaacaaataacacagaagattcggttcttacgttcttgccattaggtgtaactataacagcttgggttgcaataagacgaaggatggattattggttatcatgtcgaggagactcgaggcaagttgagagtcccatgatgtggcatctcaatcatgatgtgcaccatcgtcacaattaagtcatagctattgggacaacgttgaaacaatttgtctcttgttttcacatatattttacaaagagggaaagtgttatcttatctccaacaattcccaaagagcataaacgggagaggaggggtaatcgattcaaacaggcgattcacatggtgaaagcatgttttgggactgaatccgagaaccatacttgatgataccaagggatcggacttccagaagtggctgcatgttgtttgtgagacatggattaatgtcaagtagcagaggaaaacctcaacattgtggatttaagcaccagaaaactgccaaccctcttcattagtagcgttagctaaacactagtcaatgttagaagctgtccataaggaataccagaaaaagcatatattaccgtctttaagcttgaaataaaaggaaccataaaccatttctccttaggtttaggagttgttgccacatggagagctccctaggctcttcttcattagtggccaaaaacatctccatttctttttttctttttttaagttaactatgaaattttaagattatgtgacgtatcattcgagaagtcatatggtttatgttgactgcattagctaataaaactctacttaagattcatgttagtgatgtggaaattgagtcatcgtgtataaaggcatcccttttccgaatgctatgaaaaaacctaaattgatccaactaaatgggaaaccatgaactgcaactttatattatcgggatattttaggcgaaataataaactaaactcgagaatatgaagttactatgtaattccaaaattgttaaagaagaaactttatatctcaagcatatgacaactaacttctatataagtggctctttggtcgttcttaaagacatgaacatataaacaaattagaaaatgttaaaaatatgttttggtccgattaaagcagccgcgggtccactagcttgttccgactcaaatagttttcgttatcactttcttctctccatttttttcatacgacataaaagtgatatagttacactaaaaagttgttttgtcctacgcatagtgacgtgtaacaatattttaaaactcaatatcacagtaatatatgactgggaaagttacaacttgaggtgtaaaagttgcacacattaacatatctataggctatagcattggtacattttaaaaaactatagcattttttttacaaaagattacattgaattattagtaaatatataatatacataaaaactgattatgttgtaaatcacataataattgtatgattgaagattgaaatgataagcctattatcgaaaataaaattagtcaaggagaaaactttgaaagatatatgaatgagttgttaattgcttgtgcataagtgtgaacatgtaaataaacttttgaatctaggtaggtccatttactttggaattgttacatagaacacttcagacaagttatgtcttaatcactttatcggtcacccataattttgtaaaaaataaaagccacattctaacaaacttttataattccattttacatttatatacaaatcaatattctaccaactttgtgctataaatattcatcacaccacaaccattcaacactctaccaacctcttctaatttctacaatcactctcttaactctttgctaagcacttcttgttaggaaaaatcattccttaatcactctcgaagctttcacaccaatattacttccttactacatctcttcattttaaagatttgttagttactttttttttttgttattgtacgaaataatttgttttctttcagacaatgttcttgtcacacaaagaatacaatcgacttgacttgcaattttttctaaacaacaaatccagcatcgagaaaagtttctatttttggattttccaaatattaacagttatagcttcgtgacttcaagaaatatccatttcaagattatttaacctttttttgtctagcaagtcatcgtattctactttgttgttgcaaatgggaagttcatgtttacctccagggttccggtttcatcctacggatgaagaactcatcgaatattacttgaaaagaaaagtcgaaggtctcgagattgagcttgaagtcattcccgtcatcgatctttatagtttcgatccttgggagttaccaggtaatatattaacttccaaaaatctatttaaagtattaggtaacttttcaaatttttaatatttttgtgttgttacttttagacaagtcgtttctcccaaaccgggacatggaatggtacttcttctgctcaagggacaaaaaatatcctaatggttttcgtacaaatcgaggaacaaaggctggttattggaaagcaaccggaaaagatcgaaaaattacttctcgttcatcttctataattggttatagaaaaactctagttttctacaaaggccgtgccccgttaggcgatagaagcaattggatcatgcatgaatatcgactatgcgatgatgatacatcacaaggatcacaaaatttaaaggtaactttataatttgatcaagttctaaaatggtttcgtttcttttgatattgagagaccattaagaaatgaatgtgtttaactatagggagcttttgtgttatgtcgtgttgctatgaagaatgagatcaaaactaatacgaaaatccgaaaaattccaagcgagcaaacaatcggatcaggagaaagctcgggtttatcaagccgagtaacgtctcctagtcgcgatgaaacaatgccgtttcactcatttgccaatcctgtatctactgaaactgattcttccaacatttggatttcacctgaattcatcctcgattcttcaaaggtaatgtgtacacaattctaaacatactgataactaactaaaccaatgtttgttaatcgtataccggttttataatttttgtaggactatcctcaaatccaagatgtcgcatctcagtgcttccaacaagactttgattttccgatcatcggtaaccaaaacatggagtttccagcgagtacaagcttagatcagaacatggatgagtttatgcaaaacggttattggacaaattatggatacgatcaaaccggtttattcggttactcagatttctcctagacggaagtatttggtctctctttacgacaaaaacaccttttatcgttttaagtattggaagacttttggcattggtctaaatatatgaatgagtttcataattctgtttttttttcttttactttttatgggattattatattttatatgaaaatgtttaccgttagttatatatcttatatatatgaagctgtattttatattccatatggattctcttaaaagtctcaataggattatgcactactgtcatccttcaactatctatctctcattagtcatttctattacaatgattaattggaccagtgtggtcaccacactattataccatctttttgtgacgtcactatatataacctttagaataaacttttgtggaagtgataagttgataacaatgactctgtgtaaaacaatcttttaacaaaaggaatcatggcaccaaaaatactaaacacttatgaagttatgaacaacataatttttctctaatacagaaaaaaataggattgaaaaattgcatctctataataaaaataaaggagcataattgaagttataggatatcaagtttcccaaaaaaaatctcatcgtttgaccacttggatgagctttataaaaaaattattttattttggtattaaaatgtaatgtgattttctagaagtattaagattaataaaattatttgtaggcatataacaaattgggtccatagctcagtggtagagcaattgactgcagatcaataggtcaccggttcgaacccggttgggccctgatatttttctttttttattttttacaactttttgtagtttttgccaaaatttaccaagtaaccaacacaaatcaaaaagtaatctttttttttaccaacgtaactcttcaaattaacacctcgtgttacaaaattccagaaattaaaaacataacaaaatcggtcgcaacagagaatcgaaatcacgtagtagaaaaccgagacaaaaccaaaataagccgtatcgtaacgatacattcaatctacacaaccactagattaaccggttctcaattcgcacctccacagtcttatcgtactccttaaagcaggcgattgttcccaattcctcaacctcatcaatcacagtatcaagcctcgcaaccatttccacaagaagtgacgcaaacgcagcaaatggtaacgcttccgaaaactccaaacttttcataaccgcgattttgctcaattgtttcctcaatctcctcttctctccggtcgccgccgatttcttcaccgatcttaagctagagagtgaaacaacgctgtttaacggaagtggtgatacggtgtcgttctcttctatagtttctcccaaaacgcagccgtttgtgttattatcgttgtgatatgaaacggtgccgtttgagttagtttcgttgtaatatgaaacgtggccgtttaggtgcttgttagtgatgttactatgaaggttagagcctaagaagagcttaggttgtgacttgattgtggagttgagatcttttaatgccgcttcgagactgtcggagagaatctccgacgagcaatgacgtcggttttgaatgctttcggagagttctgataaaactttgcagatttctccggctagtctaacacaaggatctttgaagaggacacggatagaccttggagtcttaaaaaattaacataaaaacattataataaaactatatgctataattttaatttcttctaatgcaaataaaaggttgaataaattacctgaatctcggtttgtaagcaaccgtgaagagcaacaacagtgtaaccaaacttgcgaagaacggatccaactttgatatattgttgggatggaaatttgttgcaacgccttgtgtgtcttggctcccactttgcatacattgcctatataaatatgtgtcaatatgttcaatatagatattgggacgatattcatatacaaaaatatcaaatgaatacatttataaatgttcattagaaaagaaacatttttacacaaagatattcaagatatataatttaactagtcggattcgaaataaagattttgatttaagatgtcttacgagcgcttcgtcggcggatttagaatccaaaacagtattatacccgttgtagattaggtcttcatcatcagattcagaatctgatgtttcgttgtctttcagcttctcctcaaaatactcactcacacatgctaacatgtatatagaataaaaaaccatttatactatgtaactttatattatgcatacacatatatgtatagttataatttgcatgtttaatacattgatgtttatggttttaaggaatatgtaccttcaatacatcgagagaggccttggagcttagtaatagttgatttgtgaaggtcatcaccagaccagatcgggaaaaacagaaggctcatgaagaggcaaatgccaatacccataccaatggtatataatctctcatgcgcgatcttaatcacagtatccactctataacttgatactgtgattagattaaacgtcaaaagaaatacaagcatgccgtaatcgtagtttttctttatgtacggaataaatctcatgtatgttatcatcgatcctgttacacatatgaatgtacaacgtgatattagatatctttaaattatggaaataaagtcatagattggataactatgaaacaaacaaaaatgctacatgacgggaaataaaataacaaaacagaagaaaatgagaggtttagttattgaaatgtggataactctaatacatgggatttgtcatgatgttggtttaaagtttttttgtatattatatcttataaatatttgtcatacataaagtgaacaatttataaggaagtaaaacgtaccgatggtgaaaacagaagtgccaatgaagatacctccgagaattttaccggaatgaatagcaacccactcaataaagaatgccaaagatcctgctattagtgtccctaatcctctatttaatcccttgcgtaatgttgcacctgaaattatatatacccaaccaagttttatgaaaataccactaatgaattaagccactaacaattgaggaccatggctagatatttttcaagatgcaagtaactaatcaataagccacttagtctcaaagaaatacgccaaatgtttttgtccttctgccgttccaattccgctttattaattgtgtattaattaagcaaaaaaatttccatcagaatcataaaatatggtaccatctgaattcgtaatttcgttttttcatataacatagccggtcctggactggagtttcaaactctagaagtgatagtaccatttatggtgtaacgtcactagaggaaacttttactttaacattgctgaaattaaatgtcattattaacggctgtaagccatttggcctgcttggccagctctggataagatcacaactcacaagcaaagaatgtaaattattgatttaagatcgtgtgattggaacaatagatccatgattccaatcacaagatcttttaatacgaacaagagatctttcttgatcaaattctatgtccttgtagaaagataattaagatcacaagcaaaaaatggttaatatacttaccggcagagaactcaagaaccacaacgacggtcatgactgcccaaagagcattttttccaacaccttcgaaaaaaggttccatgagatacaataaagacacaagcgttaaggcaactcctactttcaaagcatgtatcactctcctcggatcttcctttcccacattccatagattccttagaatcttcttcatcttcttcggaagatttagacccttctttctcttctttctagaatcttcatcttccatggaaatctccatgctccgtgcttcgaccttgtaccccatttttttctttgatgtgttcttgttctatgttttgttgtttacttacgatgaaagaatatataaaatcttttatatattaatgtactttagtgaaataatctaaaatatgaaaggggttttcgttttcttgtactctagctttgtgtatctagaatagtgggtgaactaagagagagtcggacaataagtttacttttttatttaaataatggattccagttctatttcaaaattttagtttatagttttcataatatgtgattagccgttaataattgaaatgcgtaaagtattcgttacaataaacaacacaaaaccacactaatatatactaatctctgcttgattctgttgtcatgatcatatatgcaagtttgccaaaaaaaaaaaaagaaaaaaaaaagatcatatatatgcgaaagtaaaaaactttaaaatttcaatatgtttgtacgatcatgtgatttgcaattttgcatacttaccttaaaaggataagaacataatatatatcttgtttgtacggtataaactacaaaatgatgagagattagagtattagacttatgggtttcaaatgacaaagatatttcataaactaaatttatgatcagatttaaaaatccatcaccgacataccataaaaagaacgaaatgacaaagatatttcataaatttattccattgagtcatgttcatttcctttatattatttacaccatttatctttttgtaatcaaacattgtacttgttatgaaacctaaaataattagtttttgaatgataagtccatattacctaacagattatacgagttcaatttattgttccaagtatactttatgtttttgttctagagtggaattcaattcgaaatataattaaaaatcaccattttgagaaagcgtgttagaacaccacattgaaaatgtgatgaaacttactacaatactgaataagcaacatttacaaattcactcattgcccacgaaactttacataatgtccatatttttatccatttatttcattctcatttatctgtttttgttttatctacctgtcgacaaatatcgtgtattgattatttgatttctagataaatcccaaatcttcatatgtttagagcggactatcaatatatcttattatgagagatttttattcttttaagatttggacggtccctttagatgtataattattgatttttaattggatttctcccataaaaatcggtgtttaattgatgaataagcagtggactgaagacaatttaatgaacgtcaatttgtcgcaaaatgaatggacagtattgatgctttcatttctctactacaatgattagttggaaacactattgaaacatattttgacattactatctattacctattaacctattcacgaattatatactttgatacgaatgattttgataagaaaaactatataaaaaattaaacctacaaatttttttttggtgcaaacatatttcattcaaatcaacccatacgtagtacaaaatttaaacaaacatctacatgtatcccatttaaaatctacaactataaatagaagcaatagtttaattttgaaacagtttttttttttttttggtgtgggatcgatgattcacttatacaaagggggaccaatataacatgctatataatttgtcgttctaaatgtaattatttagaaaaggaaaatgtgaagtagctgcttgctaaaaaatatctaagaaacccccaaaaacaaaaaggttacatctttttcattagttggttcagaagctaattatagatctatgatattttatttttccttcaatactacattagtatgtaaatattttgaaatataaagtatttgtaagcgttgagaaaatacattttaggttggtccaaaaaaagcatttgagtggagtacaagatatctctggttttacctctttttcattttattttcaaattccgatattacatatgacttaccaaaaataacgactttcacaatgcagaaatatatacacataattttttcttagcgaacccttgaaaatcaccaccgcactcatgtttacatattccgaaaataagtagtaagtaccccaaaaaaaaaattcccatcattgcataaaagagaatagatcacatcaaaactaaaccaaatcaaatcaaaccaaaaagccaaacctcatcatacctattggttcgatcttaacttcttaaatctaatcatacactatatataatccggaatatgtagttcaattggtatagtaccaaaaatagttttaaagatatcatgatgttgaatactagcgacatggacatggtccaaaccaaaactgtccgcaaccgcattttcactccacgccaaccactaggtctgccggcttctcgactcgaacctccacatccttctgatcaacgttgttatcataatccttaaagcaggcgatcgttcctagctcctccacttcctcaatcacattgtcaagcctagcaaccatttccactagtagtgacgcaaaagccgcaaatggtaacgcctccgagaattcaagactcgtcaacaccacaatcctgctcaattgttgcctcagaatctttctttcgttagtcgctgccgccgatcttcgttctaacgtatcagccctcaatctagaaaacgaaacgtttggtccaaaacgtgacatgcgttcaccacgtggcgttccagtgttttgatacgaagcggcctcgtttgtgtctttattaatgtgttgtgaaactgcaacgttggggttatgtctaccgctatttccttgagacacgttgccgttttggctagagccgaggaagagtttaggttgtgatttaatggctgtgttgagatcttgtaatgccacttggagactgtcggagagaatctccggggaacagtgacgtcggtttctaatgcttgcggcaagttccgataaaaccttgcagatttctccagctagtcgtacgcaaggatccttgaagagtccacggagaggcctcggagtcttgaaaattaacagaaacaacattatatatcaatatacaaaaactgaactatagcttataactaaatataatttctagtttcaaaacaaaagaacattttaaagttacctgaatttcggtttttaagcaaccatgaagagcaacaacagtgtaaccaaactgacgaagaacagatccaactttaacataatgtttccatggaaatctatgacaatgtcgtgtgtgtcttggctcccaacttgcatacattgcctatatacacatgttcatatacattcaagtttttgttttcattcgagttttgaaataaattttcgatagaaattacttacaagtgcttcatcggcggatttggaatccaaaacagtcttatatccgttatagatcgtgtcttctgacaaatctgatgtttcttcgtctttctcctcctcttcaaagtactcattcacacatgctagtaaaaaataccgtatatttaatcagcttaactaattggaacaatataataataaatttttgcacttaaaaacaacaatatcgcaatatcgttacaaaatataaaaatgatcgaaattagcaagatttactaactcaattatgaaaatatatctactttcttatttcttgattccaaacaaaaaaaactctagattgctaaaaatttcacattgaaaataagatgaggccgaaagtataaaaagcaatctatttaatttgaatatataatatttaagtacataccttcgatggaataggagaggccttgaagcttagcgacggtggatttgtgaaggtcctcaccagaccaaataggaaaaaccaaaaggctcatgagcagacaaataccaacacccatggctatagtatagaatctctcatgtgcaattttaatcacggtatcaactctataactcgatactgttattagattgaacgtcaagagaaatataagcatgccgtaatcgtagttctttttaatgtatggaataaatctcagatatgttatcaacgctcctgttacattaacaaaacaagtagttaatacaaaaattgtccaaaacaaatgaaattatagatatcccaagttttggaaactattaatttgttagggtcttatagtaatgtcacattactaatttattttgattatgtgataattaagagttaagtttcgtaaactattcgtttgttacaacgtggattgattgtgtaataattaagaaagtattcataccaatgataaaaactgcggcgccaatgaaaatagctcggaaaatcttgccggaatcattagccacaaattctatgaaaaatgccaaagatccagcaattagtgtccctaatcctctattaagccctttgcacaacgttgcacctgaattattaaacaccattcatttacatcatttaaataacttaagcttatacacaaaatattaacgctctaatcattttagctattgttatgagcaaataatcttttcatgccttcgttttttttatttacaccatcaaaacgacagactaaacccgatataaactagtctatgaactaggaatttctcgcaaatggatcatgagaatattatacaacacatggattcttgattgaatccaaattaaaaaaaaatataaaaaatctacaagttgaattaaatgttataattaccggcagagaactctaggacgacaacaacggtcatgactgcccaaatagcactgtttccaatgcctttgaagagaggctccatgagatacaataaagacacaagtgttaacgaaactcctactttcaaagcatgtttcactctccttggatcatcttttccaactttccatatattctttagaatcttcttgatctttgttggaagttcaagaacctttgtcttcatgtttttagtagagccttcttcctccattcccatgctcctttcatggaccctgtccgacattgttttttgtctttttgggttcaaaattagaattattgaatatgaaagagagtttaggtgttagtgtactatctatatataattgtatgcatatacgtatactatgtgcaacgcatagacacgagactagttagcccgacgaagcaaattataattcaatacgtgtgttttaattgtgtgtctgtctatatattgtctatgtgtatcagtgtatgtgtgtataatttatttagttatcacaatattttttctgaaaacatagcaatagtaatttagatagtaaaaataaatatatttacaaagttacattttgtatttattttttttatttttttttgtgaactcaataattcataacataaagagaacaaatggattttaatagctattttcttgataatgtacaagtgacgagagactggttttcacatgacttgcaataatatgatggtggttaaagaaatttttattttctcttttttgctacataaattggggaaaacaaaaagtcaagatatattaaaactaatttgtggccgttcattaaaaaatactattaatgacgttccatattgaacttgttaaattaaaaaacgaataagttttagattcaccattcatattcatgcatgtgtcactcaattcattcatcaaaataaatcaaaatacattgttgtgcgcagatcttgatcagatatcttattttgctgcattatgtttttttttctctgacagagtaaattaacaaatctacatctaaatgtaggcaagataattgtgatgatgctagagtcatataaaaccaaaatttataagtggtttcaagtatcagacaaatgaaaatgagttggatgtgtttcaaatttcgttgtccttttttaacctaacacatttgaaaagctttattatacacaagtgaaaataaatttgattacgtgggtgagaatttgttatcaacacgactaagacttataatttgtcgtgttaggttgaaatattactatttgtccacaacctggtgacagcagaagaccgaaaaagaaagaaaataatatcaaaatatttaatttaattgatctacctatgactcatcgacgtaataatcatacaattactagtataatataaggtaatcatccaataataaatgtatatttaatgagtaatgacggcgattatgacagacctaatataaaactaagcccactaatgttatagtttcatcgtagatattttatttttcctaagtccttggctttaaactattttattaacattttaatttcaatcacatagatactgttgttaattagcgattgactaacaaaaatattacaagaatatacgaattttttttttcacgccgttcggcaaattatattcttgtagatattagtatttttctacaagtcttgtagttattattttagttattattttagttgatgtatgtttatatattaaaaatccaaaataaatcatcaccaattagattcattgtttgtaagaaagaaaaataaattagattcatagtatttgaactttctctaacatacttttcaactaggtaagcttatcagaaaatcaatactttaaactttctttttgagaaaatgttattttctatttcattttttttcattgcatacaaatatatactctgttacctttatgcaaacaatatagccaaaatctttataagtttcataaccagttacgattttcaaatattatttacttctttaaactgcttagattcagatgcaatatgaatcatatattaataatcattccttgctattcaatttataacaagaatctaaaaacatcatatcgagcgaaaattggaggtcttgtataagaaaaggattcatatgtgtgcaaaacagagaacttggtagtagtagtagaaatacacaattgcacaaatgtgtttagataatcccaaagagaatcactgtctattttcagaaactaaattcacagttaaataacattataagttctcaagaatctaatggattgatatcgaaattaatgaaacacaagttctaacctttctctgattcaatcacacactattcagcaaatctttctccttggttttcattgttcaatgcattaatggctgaagtttcccatcagaagatatcactaaacctctcacttttgcagcttttgttttgcactttcttggtaaagtcttgcagttttggtcttctaagaactcatctgcaacatctccgtcttcatcaatcttaagccgcatcgagtaccaacgtagtccct
